(19) United States
(12) Patent Application Publication
(10) Pub. No.: US 2023/0357774 A1
(43) Pub. Date: Nov. 9, 2023

(54) COMPOSITIONS AND METHODS FOR THE TREATMENT OF ANGIOPOIETIN LIKE 7 (ANGPTL7) RELATED DISEASES

(71) Applicant: EMPIRICO INC., San Diego, CA (US)

(72) Inventors: Omri GOTTESMAN, San Diego, CA (US); Shannon BRUSE, San Diego, CA (US); Paul BUSKE, Madison, WI (US); Brian CAJES, San Diego, CA (US); David LEWIS, Madison, WI (US); David ROZEMA, Cross Plains, WI (US)

(21) Appl. No.: 18/028,992

(22) PCT Filed: Sep. 28, 2021
(86) PCT No.: PCT/US2021/052424

§ 371 Date: Mar. 28, 2023

Related U.S. Application Data
(60) Provisional application No. 63/085,084, filed on Sep. 29, 2020.
(60) Provisional application No. 63/116,068, filed on Nov. 19, 2020.

(51) Int. Cl. C12N 15/113

(52) U.S. Cl. CPC C12N 15/1136; C12N 2310/14; C12N 2310/3515; C12N 2310/344; C12N 2310/343; C12N 2310/315

(57) ABSTRACT

Provided herein are oligonucleotide compositions that inhibit ANGPTL7 and reduce intraocular pressure when administered to an eye. The oligonucleotide compositions contain nucleoside modifications.

### CROSS-REFERENCE

[0001] This application claims the benefit of U.S. Provisional Application No. 63/085,084, filed Sep. 29, 2020, and U.S. Provisional Application No. 63/116,068, filed Nov. 19, 2020, each of which is incorporated herein by reference in its entirety.

### SEQUENCE LISTING

[0002] The instant application contains a Sequence Listing which has been submitted electronically in ASCII format and is hereby incorporated by reference in its entirety. Said ASCII copy, created on Sep. 24, 2021, is named 54462-722_601_SL.txt and is 3,591,193 bytes in size.

### BACKGROUND

[0003] Eye disorders are abundant and affect a wide variety of people. Improved therapeutics are needed for treating these disorders.

### SUMMARY

[0004] Glaucoma is a heterogenous group of diseases, affecting more than 70 million people worldwide, that is characterized by optic nerve damage resulting in a progressive loss of retinal ganglion cells, leading to loss of vision. The different subtypes of glaucoma are generally stratified by the iridocorneal angle, with open-angle glaucoma accounting for approximately 75% of cases. Though the pathophysiology of glaucoma remains poorly understood, a primary causal feature and risk factor is elevated intraocular pressure (IOP). IOP is determined by a balance between aqueous humor secretion from the ciliary body and its drainage through the trabecular meshwork and uveoscleral outflow pathways. Reducing IOP is the only strategy that has been proven to prevent the development or slow the progression of glaucoma and consequently, treatment of glaucoma has been focused on lowering IOP to target levels by increasing aqueous outflow or decreasing aqueous production. Several classes of IOP-lowering medications are used, including prostaglandin analogues, beta-adrenergic blockers, alpha-adrenergic agonists, carbonic anhydrase inhibitors and most-recently rho kinase inhibitors. Surgical methods, such as laser trabeculoplasty to improve drainage of aqueous humor through the trabecular meshwork, are also employed. Despite the availability of medical and surgical therapies for glaucoma, it is the leading cause of irreversible blindness worldwide, and there remains a need for novel therapeutic strategies that may further reduce the risk of the significant morbidity and reduction in quality of life associated with loss of vision. The compositions and methods described herein may be used to address this need.

[0005] In one aspect, a composition is provided comprising an oligonucleotide that targets Angiopoietin-like 7 (ANGPTL7) and when administered to a cell decreases expression of ANGPTL7, wherein the oligonucleotide comprises a small interfering RNA (siRNA) comprising a sense strand and an antisense strand, and wherein: (i) the sense strand comprises a modification pattern selected from the group consisting of: 5′-NfsnsNfnNfnNfnNfnNfnNfnNfnNfnNfsnsn-3′ (SEQ ID NO: 11394), 5′ nsNfsnNfnNfnNfNfnnnnnNfnNfNfnsnsn-3′ (SEQ ID NO: 11541), and 5′-NfsnsNfnNfnNfnnNfNfNfNfNfnNfnnNfsnsn-3′ (SEQ ID NO: 11542); (ii) the antisense strand comprises a modification pattern selected from the group consisting of: 5′-nsNfsnNfnNfnNfnNfnNfnNfnNfnNfnsnsn-3′ (SEQ ID NO: 11399), 5′-nsNfsnNfnNfnNfNfnnnnNfnNfnnnsnsn-3′ (SEQ ID NO: 11400), 5′-nsNfsnnnnnnnnnnnNfnnnnnsnsn-3′ (SEQ ID NO: 11401), 5′-nsNfsnnnnnnnnnNfnNfnNfnNfnsnsn-3′ (SEQ ID NO:11543), and 5′-nsNfsNfnNfnnnnnnNfnNfnNfnNfnsnsn-3′ (SEQ ID NO:11544); or (iii) a combination of (i) and (ii), wherein “Nf” is a 2′-fluoro-modified nucleoside, “n” is a 2′-O-methyl modified nucleoside, “s” is a phosphorothioate linkage, and “N” comprises a nucleoside. In another aspect, a composition is provided comprising an oligonucleotide that targets Angiopoietin-like 7 (ANGPTL7) and when administered to a cell decreases expression of ANGPTL7, wherein the oligonucleotide comprises a small interfering RNA (siRNA) comprising a sense strand and an antisense strand, and wherein the sense strand comprises the modification pattern of: 5′-nsnsnnNfnNfnNfnnnnnnnnnnsnsn-Lipid-3′ (SEQ ID NO: 11396), wherein “Nf” is a 2′-fluoro-modified nucleoside, “n” is a 2′-O-methyl modified nucleoside, and “s” is a phosphorothioate linkage. In some cases, the oligonucleotide comprises a lipid attached at a 3′ or a 5′ terminus of the oligonucleotide. In some cases, the oligonucleotide comprises a lipid attached at a 3′ terminus of the sense strand. In some cases, the oligonucleotide comprises a lipid attached at a 5′ terminus of the sense strand. In some cases, the lipid is selected from the group consisting of: cholesterol, myristoyl, palmitoyl, stearoyl, lithocholoyl, docosanoyl, docosahexaenoyl, myristyl, palmityl stearyl, α-tocopherol, and any combination thereof. In some embodiments, the lipid includes a sterol such as cholesterol. In some cases, the lipid is cholesterol. The lipid may be attached by a linker. In some cases, the oligonucleotide further comprises an arginine-glycine-aspartic acid (RGD) peptide attached at a 3′ or 5′ terminus of the oligonucleotide. In some cases, the RGD peptide is selected from the group consisting of: Cyclo(-Arg-Gly-Asp-D-Phe-Cys), Cyclo(-Arg-Gly-Asp-D-Phe-Lys), Cyclo(-Arg-Gly-Asp-D-Phe-azido), an amino benzoic acid derived RGD, and any combination thereof. The RGD peptide may be attached by a linker. In some cases, the antisense strand is complementary to a portion of a nucleic acid having the nucleoside sequence of SEQ ID NO: 11085. In some cases, the sense strand and the antisense strand each have 14 to 30 nucleotides. In some cases, the sense strand comprises a nucleoside sequence having at least 85% sequence identity to any one of SEQ ID NOS: 1-2206 or 11450-11474. In some cases, the sense strand comprises the nucleoside sequence of any one of SEQ ID NOS: 1-2206 or 11450-11474, or a sense strand sequence thereof having 1 or 2 nucleoside substitutions, additions, or deletions. In some cases, the sense strand comprises the nucleoside sequence of any one of SEQ ID NOS: 1-2206 or 11450-11474. In some cases, the sense strand consists of the nucleoside sequence of any one of SEQ ID NOS: 1-2206 or 11450-11474. In some cases, the sense strand comprises one of SEQ ID NOS: 11470, 11473, or 11474. In some cases, the antisense strand comprises a nucleoside sequence having at least 85% sequence identity to any one of SEQ ID NOS: 2207-4412 or 11475-11499. In some cases, the antisense strand comprises the nucleoside sequence of any one of SEQ ID NOS: 2207-4412 or 11475-11499, or a sense strand sequence thereof having 1 or 2 nucleoside substitutions, additions, or deletions. In some cases, the antisense strand comprises the nucleoside sequence of any one of SEQ ID NOS: 2207-4412 or 11475-11499. In some cases, the antisense strand consists of the nucleoside sequence of any one of SEQ ID NOS: 2207-4412 or 11475-11499. In some cases, the antisense strand comprises one of SEQ ID NOS: 11495, 11498, or 11499. In some cases, the sense strand comprises the nucleobase sequence of SEQ ID NO: 11474 or a nucleobase sequence thereof having 1 or 2 nucleoside substitutions, additions, or deletions relative to the nucleobase sequence of SEQ ID NO: 11474; and the antisense strand comprises the nucleobase sequence of SEQ ID NO: 11499 or a nucleobase sequence thereof having 1 or 2 nucleoside substitutions, additions, or deletions relative to the nucleobase sequence of SEQ ID NO: 11499. In some cases, the sense strand comprises the nucleobase sequence of SEQ ID NO: 11474, and the antisense strand comprises the nucleobase sequence of SEQ ID NO: 11499. In some cases, the sense strand comprises the nucleotide sequence of SEQ ID NO: 11545. In some cases, the antisense strand comprises the nucleotide sequence of SEQ ID NO: 11306. In some cases, the sense strand comprises the nucleotide sequence of SEQ ID NO: 11546. In some cases, the antisense strand comprises the nucleotide sequence of SEQ ID NO: 11306. In some cases, the antisense strand comprises the nucleotide sequence of SEQ ID NO: 11547. In some cases, the sense strand comprises the modified sequence of SEQ ID NO: 11500. In some cases, the antisense strand comprises the nucleotide sequence of SEQ ID NO: 11548. In some cases, the sense strand comprises the nucleotide sequence of SEQ ID NO: 11500.

[0006] In another aspect, a composition is provided comprising an oligonucleotide that targets Angiopoietin like 7 (ANGPTL7) and when administered to a cell decreases expression of ANGPTL7, wherein the oligonucleotide comprises a small interfering RNA (siRNA) comprising a sense strand comprising a nucleoside sequence having at least 85% sequence identity to any one of SEQ ID NOS: 11402-11421, 11442-11445, or 11500-11503; and an antisense strand comprising a nucleoside sequence having at least 85% sequence identity to any one of SEQ ID NOS: 11422-11441, 11446-11449, or 11504-11507. In some cases, the sense strand comprises the nucleoside sequence of any one of SEQ ID NOS: 11402-11421, 11442-11445, or 11500-11503, ora sense strand sequence thereof having 1 or 2 nucleoside substitutions, additions, or deletions. In some cases, the sense strand comprises the nucleoside sequence of any one of SEQ ID NOS: 11402-11421, 11442-11445, or 11500-11503. In some cases, the sense strand consists of the nucleoside sequence of any one of SEQ ID NOS: 11402-11421, 11442-11445, or 11500-11503. In some cases, the antisense strand comprises the nucleoside sequence of any one of SEQ ID NOS: 11422-11441, 11446-11449, or 11504-11507, or an antisense strand sequence thereof having 1 or 2 nucleoside substitutions, additions, or deletions. In some cases, the antisense strand comprises the nucleoside sequence of any one of SEQ ID NOS: 11422-11441, 11446-11449, or 11504-11507. In some cases, the antisense strand consists of the nucleoside sequence of any one of SEQ ID NOS: 11422-11441, 11446-11449, or 11504-11507.

[0007] In another aspect, a composition is provided comprising an oligonucleotide that targets Angiopoietin like 7 (ANGPTL7) and when administered to a cell decreases expression of ANGPTL7, wherein the oligonucleotide comprises a small interfering RNA (siRNA) comprising a sense strand comprising a nucleoside sequence of any one of SEQ ID NOS: 11377, 11442, 11445, 11500, 11501, 11502, or 11503; and an antisense strand comprising a nucleoside sequence of any one of SEQ ID NOS: 11306, 11446, 11449, 11504, 11505, 11506, or 11507. In some cases, the sense strand consists of a nucleoside sequence of any one of SEQ ID NOS: 11377, 11442, 11445, 11500, 11501, 11502, or 11503. In some cases, the antisense strand consists of a nucleoside sequence of any one of SEQ ID NOS: 11306, 11446, 11449, 11504, 11505, 11506, or 11507.

[0008] In yet another aspect, a pharmaceutical composition is provided comprising: (a) a composition described herein; and (b) a pharmaceutically acceptable carrier.

[0009] In yet another aspect, a method of decreasing expression of Angiopoietin-like 7 (ANGPTL7) in a cell is provided, the method comprising administering to the cell a composition described herein, thereby decreasing expression of ANGPTL7 in the cell.

[0010] In yet another aspect, a method of treating an ocular disorder in a subject in need thereof is provided, the method comprising administering to the subject a therapeutically effective amount of a composition described herein, thereby treating the ocular disorder in the subject. In some cases, the ocular disorder comprises a glaucoma. In some cases, the composition decreases intraocular pressure in an eye of the subject relative to a baseline intraocular pressure measurement obtained from the subject prior to administering the composition to the subject. In some cases, the composition decreases intraocular pressure in the eye of the subject by at least 10% relative to the baseline intraocular pressure measurement obtained from the subject prior to administering the composition.

### BRIEF DESCRIPTION OF THE DRAWINGS

[0011] FIGS. 1A-1D show an empty plasmid construct (FIG. 1A) used in accordance with some embodiments, GFP tagged plasmid construct (FIG. 1B), a representative ANGPTL7 pre-mRNA encoding construct (FIG. 1C) and a representative ANGPTL7 CDS encoding construct (FIG. 1D).

[0012] FIG. 2 shows fluorescent microscopy images of HEK293 cells transfected with a pcDNA3.1(+) GFP vector.

[0013] FIG. 3 shows results of qPCR measuring ANGPTL7 mRNA expression in HEK293 cells transfected with the WT and Q175H pre-mRNA expression constructs.

[0014] FIG. 4 shows results of qPCR measuring ANGPTL7 mRNA expression in HEK293 cells transfected with the WT, Q175H, R140H and R177Ter pre-mRNA expression constructs.

[0015] FIG. 5 includes an image of a western blot of ANGPTL7 in HEK293 cells transfected with the WT, Q175H, R140H and R177Ter pre-mRNA expression constructs.

[0016] FIG. 6 includes results of an ELISA assay measuring ANGPTL7 protein expression in HEK293 cells transfected with the WT, Q175H, R140H and R177Ter pre-mRNA expression constructs.

[0017] FIG. 7 shows the ratio of secreted vs. intracellular protein (as measured by ELISA) in HEK293 cells transfected with the WT, Q175H, R140H and R177Ter pre-mRNA expression constructs.

[0018] FIG. 8 includes an image of a western blot of ANGPTL7 in HEK293 cells transfected with the WT, Q175H, R140H and R177Ter CDS expression constructs.

### DETAILED DESCRIPTION

[0019] Large-scale human genetic data provides a mechanism for improving the success rate of pharmaceutical discovery and development by leveraging experiments of nature.

[0020] A Genome Wide Association Study (GWAS) is an experimental design to detect associations between genetic variants and traits in a population sample. The purpose is to better understand the biology of disease and to develop treatments based on this understanding. GWAS can utilize genotyping and/or sequencing data and often involves evaluation of millions of genetic variants that are relatively evenly distributed across the genome. The most common GWAS design is the case-control study, which involves comparing variant frequencies in cases versus controls. If a variant has a significantly different frequency in cases versus controls, that variant is said to be associated with disease. The commonly reported association statistics for GWAS are p-values, as a measure of statistical significance and odds ratios (OR) or beta coefficients (beta), as a measure of effect size. Researchers often assume an additive genetic model and calculate an allelic odds ratio, which is the increased (or decreased) risk of disease conferred by each additional copy of an allele (compared to carrying no copies of that allele). An additional and important concept in design and interpretation of GWAS is that of linkage disequilibrium, which is the non-random association of alleles. The presence of linkage disequilibrium can obfuscate which is the “causal” variant.

[0021] Functional annotation of variants and/or wet lab experimentation can identify the causal genetic variant identified via GWAS, and in many cases, this has led to the identification of disease-causing genes. In particular, understanding the functional effect of a causal genetic variant (e.g. loss or gain of protein function, increase or decrease in gene expression) allows that variant to be used as a proxy for therapeutic modulation of the target gene and to gain an insight into the potential therapeutic efficacy and safety of a therapeutic that modulates that target.

[0022] Identification of such gene-disease associations has provided fundamental insights into disease biology and is rapidly becoming an essential means of identifying novel therapeutic targets for the pharmaceutical industry. In order to translate the therapeutic insights derived from human genetics, disease biology in patients must be exogenously ‘programmed’ into replicating the observation from human genetics. Today, the potential options for therapeutic modalities that could be brought to bear in translating therapeutic targets identified via human genetics into novel medicines are greater than ever before. These include well established therapeutic modalities such as small molecules and monoclonal antibodies, maturing modalities such as oligonucleotides and emerging modalities such as gene therapy and gene editing. The choice of therapeutic modality depends on several factors including the location of the target (e.g. intracellular, extracellular or secreted), the relevant tissue (e.g. lung, liver) and the relevant indication.

[0023] Glaucoma is the leading cause of irreversible blindness in the world, with an approximate 1-2% prevalence worldwide in individuals >40 years of age. There are several subtypes of glaucoma, but two subtypes are dominant: primary open angle glaucoma (POAG) and primary angle closure glaucoma (PACG). POAG accounts for about 90% of glaucoma cases in the US and the majority of these cases occur in the context of ocular hypertension (OHT). In some populations (i.e. Asian populations) the majority of glaucoma occurs in the context of normal intraocular pressure (normal-tension glaucoma, NTG).

[0024] Glaucoma is generally characterized by blocked outflow of the aqueous humor through the conventional outflow pathway. The conventional outflow pathway is comprised of the trabecular meshwork (TM) and Schlemm's canal at the base of the cornea. There is also a non-conventional outflow pathway which involves uveoscleral drainage and accounts for a fraction of the aqueous humor outflow from the anterior compartment of the eye. Blockage of the TM/Schlemm's canal (conventional pathway) restricts aqueous humor outflow leading to increased pressure in the anterior chamber which translates to increased pressure in the posterior chamber and optic nerve degeneration and damage.

[0025] Treatments for glaucoma aim to lower intraocular pressure (IOP) to target levels (generally a 20-50% reduction in IOP). Despite normal IOP, treatment of NTG also revolves around lowering IOP. Several classes of IOP-lowering medication are used, including prostaglandin analogues (typically the first-line therapy), beta-adrenergic blockers, alpha-adrenergic agonists, and carbonic anhydrase inhibitors. These drugs are often ineffective and surgical methods (trabeculoplasty/trabeculotomy) are employed. However, the beneficial effects of trabeculoplasty/trabeculotomy decrease over time such that there is an approximate 10% failure rate per year.

[0026] Angiopoietin-like proteins (ANGPTLs) are a family of eight proteins with structural and functional similarities to angiopoietins, comprised of an N-terminal coiled-coil domain which mediates homo-oligomerization and a C-terminal fibrinogen domain. ANGPTLs are widely expressed in the liver, vasculature and hematopoietic systems, and serve important roles in inflammation, lipid metabolism, angiogenesis and extracellular matrix (ECM) formation.

[0027] ANGPTL7 was originally discovered in human corneal cDNA libraries and named cornea-derived transcript 6 (CDT6). Immunohistochemistry reveals ANGPTL7 staining in multiple tissues in the eye. ANGPTL7 is overexpressed in the aqueous humor of patients with glaucoma and is upregulated by glaucomatous conditions such as TGFβ and dexamethasone exposure.

[0028] The terminology used herein is for the purpose of describing particular embodiments only and is not intended to be limiting. As used herein, the singular forms “a”, “an” and “the” are intended to include the plural forms as well, unless the context clearly indicates otherwise. Furthermore, to the extent that the terms “including”, “includes”, “having”, “has”, “with”, or variants thereof are used in either the detailed description and or the claims, such terms are intended to be inclusive in a manner similar to the term “comprising.”

[0029] The term “about” or “approximately” means within an acceptable error range for the particular value as determined by one of ordinary skill in the art, which will depend in part on how the value is measured or determined, i.e., the limitations of the measurement system. For example, “about” can mean within 1 or more than 1 standard deviation, per the practice in the art. In some cases, “about” can mean a range of up to 20%, up to 10%, up to 5%, and up to 1% of a given value. In some cases, particularly with respect to biological systems or processes, the term can mean within an order of magnitude, e.g., within 5-fold, or within 2-fold, of a value. Where particular values are described in the application and claims, unless otherwise stated the term “about” meaning within an acceptable error range for the particular value should be assumed.

[0030] In some embodiments, the term “mRNA” means the presently known mRNA transcript(s) of a targeted gene, and any further transcripts which may be elucidated.

[0031] In some embodiments, “dsRNA”, “siRNA”, and “siRNA agent” are used interchangeably as agents that can mediate silencing of a target RNA, e.g., mRNA, e.g., a transcript of a gene that encodes a protein. In some cases, the target RNA is ANGPTL7. Such mRNA may also be referred to herein as mRNA to be silenced. Such a gene is also referred to as a target gene. In some cases, the RNA to be silenced is an endogenous gene or a pathogen gene. In addition, RNAs other than mRNA, e.g., tRNAs, and viral RNAs, can also be targeted.

[0032] In some embodiments, the phrase “mediates RNAi” refers to the ability to silence, in a sequence specific manner, a target RNA. While not wishing to be bound by theory, it is believed that silencing uses the RNAi machinery or process and a guide RNA, e.g., an siRNA agent.

[0033] In some embodiments, “specifically hybridizable” and “complementary” are terms which are used to indicate a sufficient degree of complementarity such that stable and specific binding occurs between a compound described herein and a target RNA molecule.

[0034] Specific binding may require a sufficient degree of complementarity to avoid non-specific binding of the oligomeric compound to non-target sequences under conditions in which specific binding is desired, i.e., under physiological conditions in the case of assays or therapeutic treatment, or in the case of in vitro assays, under conditions in which the assays are performed. The non-target sequences may differ by at least 5 nucleotides.

[0035] In some embodiments, a dsRNA agent is “sufficiently complementary” to a target RNA, e.g., a target mRNA, such that the dsRNA agent silences production of protein encoded by the target mRNA. In some embodiments, the dsRNA agent is “exactly complementary” to a target RNA, e.g., the target RNA and the dsRNA duplex agent anneal, for example to form a hybrid made exclusively of Watson-Crick base pairs in the region of exact complementarity. A “sufficiently complementary” target RNA can include an internal region (e.g., of at least 10 nucleotides) that is exactly complementary to a target RNA. Moreover, in some embodiments, the dsRNA agent specifically discriminates a single-nucleotide difference. In this case, the dsRNA agent only mediates RNAi if exact complementary is found in the region (e.g., within 7 nucleotides of) the single-nucleotide difference.

[0036] In some embodiments, the term “oligonucleotide” refers to a nucleic acid molecule (RNA or DNA) for example of length less than 100, 200, 300, or 400 nucleotides.

[0037] In some embodiments, the term “oligonucleotide” refers to an oligomer or polymer of ribonucleic acid (RNA) or deoxyribonucleic acid (DNA) or mimetics thereof. The term “oligonucleotide”, also includes linear or circular oligomers of natural and/or modified monomers or linkages, including deoxyribonucleosides, ribonucleosides, substituted and alpha-anomeric forms thereof, peptide nucleic acids (PNA), locked nucleic acids (LNA), phosphorothioate, methylphosphonate, and the like. Oligonucleotides are capable of specifically binding to a target polynucleotide by way of a regular pattern of monomer-to-monomer interactions, such as Watson-Crick type of base pairing, Hoogsteen or reverse Hoogsteen types of base pairing, or the like.

[0038] In some embodiments, the oligonucleotide is “chimeric”, that is, composed of different regions. “Chimeric” oligonucleotides contain two or more chemical regions, for example, DNA region(s), RNA region(s), PNA region(s), etc. Each chemical region is made up of at least one monomer unit, i.e., a nucleotide in the case of an oligonucleotides compound. These oligonucleotides typically comprise at least one region wherein the oligonucleotide is modified in order to exhibit one or more desired properties. The desired properties of the oligonucleotide include, but are not limited, for example, to increased resistance to nuclease degradation, increased cellular uptake, and/or increased binding affinity for the target nucleic acid. Different regions of the oligonucleotide may therefore have different properties. Chimeric oligonucleotides can be formed as mixed structures of two or more oligonucleotides, modified oligonucleotides, oligonucleosides and/or oligonucleotide analogs.

[0039] The oligonucleotide can comprise or be composed of regions that can be linked in “register”, that is, when the monomers are linked consecutively, as in native DNA, or linked via spacers. The spacers are intended to constitute a covalent “bridge” between the regions and have, in some cases, a length not exceeding about 100 carbon atoms. The spacers may carry different functionalities, for example, having positive or negative charge, carry special nucleic acid binding properties (intercalators, groove binders, toxins, fluorophores etc.), being lipophilic, inducing special secondary structures like, for example, alanine containing peptides that induce alpha-helices.

[0040] In some embodiments, “ANGPTL7” and “angiopoietin like 7” are inclusive of all family members, mutants, alleles, fragments, species, coding and noncoding sequences, sense and antisense polynucleotide strands, etc. of the ANGPTL7 transcript (NM_021146; SEQ ID NO: 11085). In some embodiments, “ANGPTL7” and “angiopoietin like 7” are used interchangeably in the present application.

[0041] In some embodiments, “oligonucleotide specific for” or “oligonucleotide which targets” refers to an oligonucleotide having a sequence (i) capable of forming a stable complex with a portion of the targeted gene, or (ii) capable of forming a stable duplex with a portion of a mRNA transcript of the targeted gene. Stability of the complexes and duplexes can be determined by theoretical calculations and/or in vitro assays.

[0042] In some embodiments, the term “target nucleic acid” encompasses DNA, RNA (including pre-mRNA and mRNA) transcribed from such DNA, and also cDNA derived from such RNA, coding, noncoding sequences, sense and antisense polynucleotides. The specific hybridization of an oligomeric compound with its target nucleic acid interferes with the normal function of the nucleic acid. This modulation of function of a target nucleic acid by compounds, which specifically hybridize to it, is generally referred to as “antisense”. The functions of DNA that are modulated include, for example, replication and transcription. The functions of RNA that are modulated, include all vital functions such as, for example, translocation of the RNA to the site of protein translation, translation of protein from the RNA, splicing of the RNA to yield one or more mRNA species, and catalytic activity which may be engaged in or facilitated by the RNA. The overall effect of such interference with target nucleic acid function is modulation of the expression of an encoded product or oligonucleotides.

[0043] RNA interference “RNAi” is mediated by double stranded RNA (dsRNA) molecules that have sequence-specific homology to their “target” nucleic acid sequences. In certain embodiments, the mediators are 5-25 nucleotide “small interfering” RNA duplexes (siRNAs). The siRNAs are derived from the processing of dsRNA by an RNase enzyme known as Dicer. siRNA duplex products are recruited into a multi-protein siRNA complex termed RISC (RNA Induced Silencing Complex). Without wishing to be bound by any particular theory, a RISC is then believed to be guided to a target nucleic acid (suitably mRNA), where the siRNA duplex interacts in a sequence-specific way to mediate cleavage in a catalytic fashion. Small interfering RNAs can be synthesized and used. Small interfering RNAs for use in the methods herein suitably comprise between about 1 to about 50 nucleotides (nt). In examples of non-limiting embodiments, siRNAs can comprise about 5 to about 40 nt, about 5 to about 30 nt, about 10 to about 30 nt, about 15 to about 25 nt, or about 20-25 nucleotides.

[0044] In some embodiments, selection of appropriate oligonucleotides is facilitated by using computer programs that automatically align nucleic acid sequences and indicate regions of identity or homology. Such programs are used to compare nucleic acid sequences obtained, for example, by searching databases such as GenBank or by sequencing PCR products. Comparison of nucleic acid sequences from a range of species allows the selection of nucleic acid sequences that display an appropriate degree of identity between species. In the case of genes that have not been sequenced, Southern blots are performed to allow a determination of the degree of identity between genes in target species and other species. By performing Southern blots at varying degrees of stringency, as is well known in the art, it is possible to obtain an approximate measure of identity. These procedures allow the selection of oligonucleotides that exhibit a high degree of complementarity to target nucleic acid sequences in a subject to be controlled and a lower degree of complementarity to corresponding nucleic acid sequences in other species. One skilled in the art will realize that there is considerable latitude in selecting appropriate regions of genes.

[0045] In some embodiments, “enzymatic RNA” is meant as an RNA molecule with enzymatic activity. Enzymatic nucleic acids (ribozymes) act by first binding to a target RNA. Such binding occurs through the target binding portion of an enzymatic nucleic acid which is held in close proximity to an enzymatic portion of the molecule that acts to cleave the target RNA. Thus, the enzymatic nucleic acid first recognizes and then binds a target RNA through base pairing, and once bound to the correct site, acts enzymatically to cut the target RNA.

[0046] In some embodiments, “decoy RNA” is meant as an RNA molecule that mimics the natural binding domain for a ligand. The decoy RNA therefore competes with natural binding targets for the binding of a specific ligand. For example, over-expression of HIV trans-activation response (TAR) RNA can act as a “decoy” and efficiently binds HIV tat protein, thereby preventing it from binding to TAR sequences encoded in the HIV RNA. This is meant to be a specific example. Those in the art will recognize that this is but one example, and some embodiments can be readily generated using techniques generally known in the art.

[0047] In some embodiments, “monomers” typically indicate monomers linked by phosphodiester bonds or analogs thereof to form oligonucleotides ranging in size from a few monomeric units, e.g., from about 3-4, to about several hundreds of monomeric units. Analogs of phosphodiester linkages include: phosphorothioate, phosphorodithioate, methylphosphornates, phosphoroselenoate, phosphoramidate, and the like, as more fully described below.

[0048] In some embodiments, “nucleotide” covers naturally occurring nucleotides as well as non-naturally occurring nucleotides. It should be clear to the person skilled in the art that various nucleotides which previously have been considered “non-naturally occurring” have subsequently been found in nature. Thus, “nucleotides” includes not only the known purine and pyrimidine heterocycles-containing molecules, but also heterocyclic analogues and tautomers thereof. Illustrative examples of other types of nucleotides are molecules containing adenine, guanine, thymine, cytosine, uracil, purine, xanthine, \hat{ }aminopurine, 8-oxo-N6-memyladenine, 7-deazaxanthine, 7-deazaguanine, N4,N4-ethanocytosin, N6,N6-ethano-2,6-diaminopurine, 5-methylcytosine, 5-(C3-C₆)-alkynylcytosine, 5-fluorouracil, 5-bromouracil, pseudoisocytosine, 2-hydroxy-5-memyl-4-triazolopvridin, isocytosine, isoguanin, inosine and the “non-naturally occurring” nucleotides described in Benner et al., U.S. Pat. No. 5,432,272. The term “nucleotide” is intended to cover every and all of these examples as well as analogues and tautomers thereof. Especially interesting nucleotides are those containing adenine, guanine, thymine, cytosine, and uracil, which are considered as the naturally occurring nucleotides in relation to therapeutic and diagnostic application in humans. Nucleotides include the natural 2′-deoxy and 2′-hydroxyl sugars, as well as their analogs.

[0049] In some embodiments, “analogs” in reference to nucleotides includes synthetic nucleotides having modified base moieties and/or modified sugar moieties. Such analogs include synthetic nucleotides designed to enhance binding properties, e.g., duplex or triplex stability, specificity, or the like.

[0050] In some embodiments, “hybridization” means the pairing of at least substantially complementary strands of oligomeric compounds. One mechanism of pairing involves hydrogen bonding, which may be Watson-Crick, Hoogsteen or reversed Hoogsteen hydrogen bonding, between complementary nucleoside or nucleotide bases (nucleotides) of the strands of oligomeric compounds. For example, adenine and thymine are complementary nucleotides which pair through the formation of hydrogen bonds. Hybridization can occur under varying circumstances.

[0051] In some embodiments, a compound of the disclosure is “specifically hybridizable” when binding of the compound to the target nucleic acid interferes with the normal function of the target nucleic acid to cause a modulation of function and/or activity, and there is a sufficient degree of complementarity to avoid non-specific binding of the compound to non-target nucleic acid sequences under conditions in which specific binding is desired, i.e., under physiological conditions in the case of in vivo assays or therapeutic treatment, and under conditions in which assays are performed in the case of in vitro assays.

[0052] In some embodiments, “stringent hybridization conditions” or “stringent conditions” refers to conditions under which a compound will hybridize to its target sequence, but to a minimal number of other sequences. Stringent conditions are sequence-dependent and will be different in different circumstances and “stringent conditions” under which oligomeric compounds hybridize to a target sequence are determined by the nature and composition of the oligomeric compounds and the assays in which they are being investigated. In some cases, stringent hybridization conditions comprise low concentrations (<0.15M) of salts with inorganic cations such as Na+ or K+(i.e., low ionic strength), temperature higher than about 20° C. to 25° C. and below the Tm of the oligomeric compound/target sequence complex, and the presence of denaturants such as formamide, dimethylformamide, dimethyl sulfoxide, or the detergent sodium dodecyl sulfate (SDS). For example, the hybridization rate decreases 1.1% for each 1% formamide. An example of a high stringency hybridization condition is 0.1× sodium chloride-sodium citrate buffer (SSC)/0.1% (w/v) SDS at 60° C. for 30 minutes.

[0053] In some embodiments, “complementary” refers to the capacity for precise pairing between two nucleotides on one or two oligomeric strands. For example, if a nucleobase at a certain position of a compound is capable of hydrogen bonding with a nucleobase at a certain position of a target nucleic acid, said target nucleic acid being a DNA, RNA, or oligonucleotide molecule, then the position of hydrogen bonding between the oligonucleotide and the target nucleic acid may be considered to be a complementary position. The oligomeric compound and the further DNA, RNA, or oligonucleotide molecule are complementary to each other when a sufficient number of complementary positions in each molecule are occupied by nucleotides which can hydrogen bond with each other. Thus, “specifically hybridizable” and “complementary” are terms which may be used to indicate a sufficient degree of precise pairing or complementarity over a sufficient number of nucleotides such that stable and specific binding occurs between the oligomeric compound and a target nucleic acid.

[0054] The sequence of an oligomeric compound need not be 100% complementary to that of its target nucleic acid to be specifically hybridizable. Moreover, an oligonucleotide may hybridize over one or more segments such that intervening or adjacent segments are not involved in the hybridization event (e.g., a loop structure, mismatch or hairpin structure). In some embodiments, oligomeric compounds disclosed herein comprise at least about 70%, or at least about 75%, or at least about 80%, or at least about 85%, or at least about 90%, or at least about 95%, or at least about 99% sequence complementarity to a target region within the target nucleic acid sequence to which they are targeted. For example, a compound in which 18 of 20 nucleotides of the compound are complementary to a target region, and would therefore specifically hybridize, would represent 90 percent complementarity. In this example, the remaining noncomplementary nucleotides may be clustered or interspersed with complementary nucleotides and need not be contiguous to each other or to complementary nucleotides. As such, a compound which is 18 nucleotides in length having 4 (four) noncomplementary nucleotides which are flanked by two regions of complete complementarity with the target nucleic acid would have 77.8% overall complementarity with the target nucleic acid and would thus fall within the scope of the present disclosure. Percent complementarity of a compound with a region of a target nucleic acid can be determined routinely using BLAST programs (basic local alignment search tools) and PowerBLAST programs known in the art. Percent homology, sequence identity or complementarity, can be determined by, for example, the Gap program (Wisconsin Sequence Analysis Package, Version 8 for Unix, Genetics Computer Group, University Research Park, Madison Wis.), using default settings, which uses the algorithm of Smith and Waterman.

[0055] In some embodiments, the term “Thermal Melting Point (Tm)” refers to the temperature, under defined ionic strength, pH, and nucleic acid concentration, at which 50% of the oligonucleotides complementary to the target sequence hybridize to the target sequence at equilibrium. Typically, stringent conditions will be those in which the salt concentration is at least about 0.01 to 1.0 M Na ion concentration (or other salts) at pH 7.0 to 8.3 and the temperature is at least about 30° C. for short oligonucleotides (e.g., 10 to 50 nucleotide). Stringent conditions may also be achieved with the addition of destabilizing agents such as formamide.

[0056] In some embodiments, “modulation” means either an increase (stimulation) or a decrease (inhibition) in the expression of a gene.

[0057] In some embodiments, the term “variant”, when used in the context of a polynucleotide sequence, may encompass a polynucleotide sequence related to a wild type gene. This definition may also include, for example, “allelic,” “splice,” “species,” or “polymorphic” variants. A splice variant may have significant identity to a reference molecule, but will generally have a greater or lesser number of polynucleotides due to alternate splicing of exons during mRNA processing. The corresponding polypeptide may possess additional functional domains or an absence of domains. Species variants are polynucleotide sequences that vary from one species to another. Of particular utility are variants of wild type gene products. Variants may result from at least one mutation in the nucleic acid sequence and may result in altered mRNAs or in polypeptides whose structure or function may or may not be altered. Any given natural or recombinant gene may have none, one, or many allelic forms. Common mutational changes that give rise to variants are generally ascribed to natural deletions, additions, or substitutions of nucleotides. Each of these types of changes may occur alone, or in combination with the others, one or more times in a given sequence.

[0058] The resulting polypeptides generally will have significant amino acid identity relative to each other. A polymorphic variant is a variation in the polynucleotide sequence of a particular gene between individuals of a given species. Polymorphic variants also may encompass “single nucleotide polymorphisms” (SNPs,) or single base mutations in which the polynucleotide sequence varies by one base. The presence of SNPs may be indicative of, for example, a certain population with a propensity for a disease state, that is susceptibility versus resistance.

[0059] Derivative polynucleotides include nucleic acids subjected to chemical modification, for example, replacement of hydrogen by an alkyl, acyl, or amino group. Derivatives, e.g., derivative oligonucleotides, may comprise non-naturally-occurring portions, such as altered sugar moieties or inter-sugar linkages. Exemplary among these are phosphorothioate and other sulfur containing species which are known in the art. Derivative nucleic acids may also contain labels, including radionucleotides, enzymes, fluorescent agents, chemiluminescent agents, chromogenic agents, substrates, co factors, inhibitors, magnetic particles, and the like.

[0060] In some embodiments, a “derivative” polypeptide or peptide is one that is modified, for example, by glycosylation, pegylation, phosphorylation, sulfation, reduction/alkylation, acylation, chemical coupling, or mild formalin treatment. A derivative may also be modified to contain a detectable label, either directly or indirectly, including, but not limited to, a radioisotope, fluorescent, and enzyme label.

[0061] As used herein, the term “animal” or “patient” is meant to include, for example, humans, sheep, elks, deer, mule deer, minks, mammals, monkeys, horses, cattle, pigs, goats, dogs, cats, rats, mice, birds, chickens, reptiles, fish, insects and arachnids.

[0062] “Mammal” covers warm blooded mammals that are typically under medical care (e.g., humans and domesticated animals). Examples include feline, canine, equine, bovine, or primate, or just human.

[0063] “Treating” or “treatment” includes the treatment of a disease-state in a mammal, and includes: (a) preventing the disease-state from occurring in a mammal, in particular, when such mammal is predisposed to the disease-state but has not yet been diagnosed as having it; (b) inhibiting the disease-state, e.g., arresting it development; and/or (c) relieving the disease-state, e.g., causing regression of the disease state until a desired endpoint is reached. Treating also includes the amelioration of a symptom of a disease (e.g., lessen pain or discomfort), wherein such amelioration may or may not be directly affecting the disease (e.g., cause, transmission, expression, etc.). The term “treatment” is intended to encompass also prophylaxis, therapy and cure. The patient receiving this treatment is any animal in need, including primates, in particular humans, and other mammals such as equines, cattle, swine and sheep; and poultry and pets in general.

[0064] All genes, gene names, and gene products disclosed herein are intended to correspond to homologs from any species for which the compositions and methods disclosed herein are applicable. Thus, the terms include, but are not limited to genes and gene products from humans and mice. It is understood that when a gene or gene product from a particular species is disclosed, this disclosure is intended to be exemplary only, and is not to be interpreted as a limitation unless the context in which it appears clearly indicates. Thus, for example, for the genes disclosed herein, which in some embodiments relate to mammalian nucleic acid and amino acid sequences are intended to encompass homologous and/or orthologous genes and gene products from other animals including, but not limited to other mammals, fish, amphibians, reptiles, and birds. In some embodiments, the genes or nucleic acid sequences are human.

[0065] In some embodiments, the term “halo” refers to any radical of fluorine, chlorine, bromine or iodine. In some embodiments, the term “alkyl” refers to saturated and unsaturated non-aromatic hydrocarbon chains that may be a straight chain or branched chain, containing the indicated number of carbon atoms (these include without limitation propyl, allyl, or propargyl), which may be optionally inserted with N, O, or S. For example, C₁-C₁₀ indicates that the group may have from 1 to 10 (inclusive) carbon atoms in it. The term “alkoxy” refers to an —O-alkyl radical. In some embodiments, the term “alkylene” refers to a divalent alkyl (i.e., —R—). The term “alkylenedioxo” refers to a divalent species of the structure -0-R-0-, in which R represents an alkylene. The term “aminoalkyl” refers to an alkyl substituted with an amino. In some embodiments, the term “mercapto” refers to an —SH radical. The term “thioalkoxy” refers to an —S-alkyl radical.

[0066] In some embodiments, the term “aryl” refers to a 6-carbon monocyclic or 10-carbon bicyclic aromatic ring system wherein 0, 1, 2, 3, or 4 atoms of each ring may be substituted by a substituent. Examples of aryl groups include phenyl, naphthyl and the like. In some embodiments, the term “arylalkyl” or the term “aralkyl” refers to alkyl substituted with an aryl. In some embodiments, the term “arylalkoxy” refers to an alkoxy substituted with aryl.

[0067] In some embodiments, the term “cycloalkyl” as employed herein includes saturated and partially unsaturated cyclic hydrocarbon groups having 3 to 12 carbons, for example, 3 to 8 carbons, and, for example, 3 to 6 carbons, wherein the cycloalkyl group additionally may be optionally substituted. Cycloalkyl groups include, without limitation, cyclopropyl, cyclobutyl, cyclopentyl, cyclopentenyl, cyclohexyl, cyclohexenyl, cycloheptyl, and cyclooctyl.

[0068] In some embodiments, the term “heteroaryl” refers to an aromatic 5-8 membered monocyclic, 8-12 membered bicyclic, or 11-14 membered tricyclic ring system having 1-3 heteroatoms if monocyclic, 1-6 heteroatoms if bicyclic, or 1-9 heteroatoms if tricyclic, said heteroatoms selected from O, N, or S (e.g., carbon atoms and 1-3, 1-6, or 1-9 heteroatoms of N, O, or S if monocyclic, bicyclic, or tricyclic, respectively), wherein 0, 1, 2, 3, or 4 atoms of each ring may be substituted by a substituent. Examples of heteroaryl groups include pyridyl, furyl or furanyl, imidazolyl, benzimidazolyl, pyrimidinyl, thiophenyl or thienyl, quinolinyl, indolyl, thiazolyl, and the like. In some embodiments, the term “heteroarylalkyl” or the term “heteroaralkyl” refers to an alkyl substituted with a heteroaryl. In some embodiments, the term “heteroarylalkoxy” refers to an alkoxy substituted with heteroaryl.

[0069] In some embodiments, the term “heterocyclyl” refers to a nonaromatic 5-8 membered monocyclic, 8-12 membered bicyclic, or 11-14 membered tricyclic ring system having 1-3 heteroatoms if monocyclic, 1-6 heteroatoms if bicyclic, or 1-9 heteroatoms if tricyclic, said heteroatoms selected from O, N, or S (e.g., carbon atoms and 1-3, 1-6, or 1-9 heteroatoms of N, O, or S if monocyclic, bicyclic, or tricyclic, respectively), wherein 0, 1, 2 or 3 atoms of each ring may be substituted by a substituent. Examples of heterocyclyl groups include trizolyl, tetrazolyl, piperazinyl, pyrrolidinyl, dioxanyl, morpholinyl, tetrahydrofuranyl, and the like.

[0070] In some embodiments, the term “oxo” refers to an oxygen atom, which forms a carbonyl when attached to carbon, an N-oxide when attached to nitrogen, and a sulfoxide or sulfone when attached to sulfur.

[0071] In some embodiments, the term “acyl” refers to an alkylcarbonyl, cycloalkylcarbonyl, arylcarbonyl, heterocyclylcarbonyl, or heteroarylcarbonyl substituent, any of which may be further substituted by substituents.

[0072] In some embodiments, the term “substituted” refers to the replacement of one or more hydrogen radicals in a given structure with the radical of a specified substituent including, but not limited to: halo, alkyl, alkenyl, alkynyl, aryl, heterocyclyl, thiol, alkylthio, arylthio, alkylthioalkyl, arylthioalkyl, alkylsulfonyl, alkylsulfonylalkyl, arylsulfonylalkyl, alkoxy, aryloxy, aralkoxy, aminocarbonyl, alkylamino carbonyl, arylaminocarbonyl, alkoxycarbonyl, aryloxycarbonyl, haloalkyl, amino, trifluoromethyl, cyano, nitro, alkylamino, arylamino, alkylaminoalkyl, arylaminoalkyl, aminoalkylamino, hydroxy, alkoxyalkyl, carboxyalkyl, alkoxycarbonylalkyl, aminocarbonylalkyl, acyl, aralkoxycarbonyl, carboxylic acid, sulfonic acid, sulfonyl, phosphonic acid, aryl, heteroaryl, heterocyclic, and aliphatic. It is understood that the substituent can be further substituted.

[0073] Oligonucleotide Compounds and Compositions

[0074] Some embodiments refer to nucleic acid sequence information. In some embodiments, any uracil (U) may be interchanged with any thymine (T), and vice versa. For example, in an siRNA with a nucleic acid sequence comprising one or more Us, in some embodiments any of the Us may be replaced with Ts. Similarly, in an siRNA with a nucleic acid sequence comprising one or more Ts, in some embodiments any of the Ts may be replaced with Us. In some embodiments, an oligonucleotide such as an siRNA disclosed herein comprises or consists of RNA. In some embodiments, the oligonucleotide may comprise or consist of DNA.

[0075] Some embodiments refer to a particular nucleic acid sequence comprising modified nucleic acids. In some embodiments, an oligonucleotide described herein comprises or consists of a nucleic acid sequence comprising an unmodified version of the nucleic acid sequence comprising modified nucleic acids. In some embodiments, an oligonucleotide described herein comprises or consists of a nucleic acid sequence comprising the nucleic acid sequence comprising modified nucleic acids, but with any one or more additional modifications or different modifications.

[0076] In some embodiments, provided herein are oligonucleotide compounds that target a nucleic acid sequence of angiopoietin-like 7 (ANGPTL7), including, without limitation, sense and/or antisense noncoding and/or coding sequences associated with ANGPTL7. In some embodiments, the target nucleic acid molecule is not limited to ANGPTL7 polynucleotides alone but extends to any of the isoforms, receptors, homologs, non-coding regions and the like of ANGPTL7.

[0077] In some embodiments, provided is a composition comprising one or more dsRNA agents targeted to a first nucleic acid and one or more additional compounds targeted to a second nucleic acid target. For example, the first target may be a particular sequence of angiopoietin-like 7 (ANGPTL7), and the second target may be a region from another nucleotide sequence. In some embodiments, compositions may contain two or more dsRNA compounds targeted to different regions of the same ANGPTL7 nucleic acid target. Numerous examples of dsRNA compounds are illustrated herein, and others may be selected from among suitable compounds known in the art. Two or more combined compounds may be used together or sequentially.

[0078] In some embodiments, a composition is provided that includes a plurality of dsRNA agent species. In some embodiments, the dsRNA agent species has sequences that are non-overlapping and non-adjacent to another species with respect to a naturally occurring target sequence. In some embodiments, the plurality of dsRNA agent species is specific for different naturally occurring target genes. In some embodiments, the dsRNA agent is allele specific.

[0079] The disclosure provides methods, compositions, and kits, for administration and delivery of dsRNA agents described herein.

[0080] Compositions

[0081] Disclosed herein, in some embodiments, are compositions comprising an oligonucleotide. In some embodiments, the composition comprises an oligonucleotide that targets ANGPTL7. In some embodiments, the composition consists of an oligonucleotide that targets ANGPTL7. In some embodiments, a composition described herein is used in a method of treating a disorder in a subject in need thereof. Some embodiments relate to a composition comprising an oligonucleotide for use in a method of treating a disorder as described herein. Some embodiments relate to use of a composition comprising an oligonucleotide, in a method of treating a disorder as described herein. The composition (e.g. oligonucleotide composition) may comprise or consist of a dsRNA agent described herein. The composition (e.g. oligonucleotide composition) may comprise or consist of an siRNA described herein.

[0082] In some embodiments, the composition comprises an oligonucleotide that targets ANGPTL7 and when administered to a subject in an effective amount decreases ANGPTL7 mRNA levels in a cell or tissue. In some embodiments, the cell is an ANGPTL7. In some embodiments, the tissue is ANGPTL7 tissue. In some embodiments, the ANGPTL7 mRNA levels are decreased by about 2.5% or more, about 5% or more, or about 7.5% or more, as compared to prior to administration. In some embodiments, the ANGPTL7 mRNA levels are decreased by about 10% or more, as compared to prior to administration. In some embodiments, the ANGPTL7 mRNA levels are decreased by about 20% or more, about 30% or more, about 40% or more, about 50% or more, about 60% or more, about 70% or more, about 80% or more, about 90% or more, or about 100% or more as compared to prior to administration. In some embodiments, the ANGPTL7 mRNA levels are decreased by about 200% or more, about 300% or more, about 400% or more, about 500% or more, about 600% or more, about 700% or more, about 800% or more, about 900% or more, or about 1000% or more, as compared to prior to administration. In some embodiments, the ANGPTL7 mRNA levels are decreased by no more than about 2.5%, no more than about 5%, or no more than about 7.5%, as compared to prior to administration. In some embodiments, the ANGPTL7 mRNA levels are decreased by no more than about 10%, as compared to prior to administration. In some embodiments, the ANGPTL7 mRNA levels are decreased by no more than about 20%, no more than about 30%, no more than about 40%, no more than about 50%, no more than about 60%, no more than about 70%, no more than about 80%, no more than about 90%, or no more than about 100% as compared to prior to administration. In some embodiments, the ANGPTL7 mRNA levels are decreased by no more than about 200%, no more than about 300%, no more than about 400%, no more than about 500%, no more than about 600%, no more than about 700%, no more than about 800%, no more than about 900%, or no more than about 1000%, as compared to prior to administration. In some embodiments, the ANGPTL7 mRNA levels are decreased by 2.5%, 5%, 7.5%, 10%, 20%, 30%, 40%, 50%, 60%, 70%, 80%, 90%, 100%, 200% 300%, 400%, 500%, 600%, 700%, 800%, 900%, 1000%, or by a range defined by any of the two aforementioned percentages.

[0083] In some embodiments, the composition comprises an oligonucleotide that targets ANGPTL7 and when administered to a subject in an effective amount decreases circulating ANGPTL7 protein levels. In some embodiments, the ANGPTL7 protein levels are decreased by about 2.5% or more, about 5% or more, or about 7.5% or more, as compared to prior to administration. In some embodiments, the ANGPTL7 protein levels are decreased by about 10% or more, as compared to prior to administration. In some embodiments, the ANGPTL7 protein levels are decreased by about 20% or more, about 30% or more, about 40% or more, about 50% or more, about 60% or more, about 70% or more, about 80% or more, about 90% or more, or about 100% or more as compared to prior to administration. In some embodiments, the ANGPTL7 protein levels are decreased by about 200% or more, about 300% or more, about 400% or more, about 500% or more, about 600% or more, about 700% or more, about 800% or more, about 900% or more, or about 1000% or more, as compared to prior to administration. In some embodiments, the ANGPTL7 protein levels are decreased by no more than about 2.5%, no more than about 5%, or no more than about 7.5%, as compared to prior to administration. In some embodiments, the ANGPTL7 protein levels are decreased by no more than about 10%, as compared to prior to administration. In some embodiments, the ANGPTL7 protein levels are decreased by no more than about 20%, no more than about 30%, no more than about 40%, no more than about 50%, no more than about 60%, no more than about 70%, no more than about 80%, no more than about 90%, or no more than about 100% as compared to prior to administration. In some embodiments, the ANGPTL7 protein levels are decreased by no more than about 200%, no more than about 300%, no more than about 400%, no more than about 500%, no more than about 600%, no more than about 700%, no more than about 800%, no more than about 900%, or no more than about 1000%, as compared to prior to administration. In some embodiments, the ANGPTL7 protein levels are decreased by 2.5%, 5%, 7.5%, 10%, 20%, 30%, 40%, 50%, 60%, 70%, 80%, 90%, 100%, 200% 300%, 400%, 500%, 600%, 700%, 800%, 900%, 1000%, or by a range defined by any of the two aforementioned percentages.

[0084] In some embodiments, the composition comprises an oligonucleotide that targets ANGPTL7 and when administered to a subject in an effective amount decreases a symptom of glaucoma. In some embodiments, the glaucoma symptom is decreased by about 2.5% or more, about 5% or more, or about 7.5% or more, as compared to prior to administration. In some embodiments, the glaucoma symptom is decreased by about 10% or more, as compared to prior to administration. In some embodiments, the glaucoma symptom is decreased by about 20% or more, about 30% or more, about 40% or more, about 50% or more, about 60% or more, about 70% or more, about 80% or more, about 90% or more, or about 100% or more as compared to prior to administration. In some embodiments, the glaucoma symptom is decreased by no more than about 2.5%, no more than about 5%, or no more than about 7.5%, as compared to prior to administration. In some embodiments, the glaucoma symptom is decreased by no more than about 10%, as compared to prior to administration. In some embodiments, the glaucoma symptom is decreased by no more than about 20%, no more than about 30%, no more than about 40%, no more than about 50%, no more than about 60%, no more than about 70%, no more than about 80%, no more than about 90%, or no more than about 100% as compared to prior to administration. In some embodiments, the glaucoma symptom is decreased by 2.5%, 5%, 7.5%, 10%, 20%, 30%, 40%, 50%, 60%, 70%, 80%, 90%, or 100%, or by a range defined by any of the two aforementioned percentages. In some embodiments, the glaucoma symptom is incidence of glaucoma, or of a glaucoma subtype. In some embodiments, the glaucoma symptom is severity of glaucoma, or of a glaucoma subtype. Examples of glaucoma subtypes include non-specific glaucoma, primary open angle glaucoma (POAG), and primary angle closure glaucoma (PACG).

[0085] In some embodiments, the composition comprises an oligonucleotide that targets ANGPTL7 and when administered to a subject in an effective amount decreases intraocular pressure. In some embodiments, the intraocular pressure is decreased by about 2.5% or more, about 5% or more, or about 7.5% or more, as compared to prior to administration. In some embodiments, the intraocular pressure is decreased by about 10% or more, as compared to prior to administration. In some embodiments, the intraocular pressure is decreased by about 20% or more, about 30% or more, about 40% or more, about 50% or more, about 60% or more, about 70% or more, about 80% or more, about 90% or more, or about 100% or more as compared to prior to administration. In some embodiments, the intraocular pressure is decreased by no more than about 2.5%, no more than about 5%, or no more than about 7.5%, as compared to prior to administration. In some embodiments, the intraocular pressure is decreased by no more than about 10%, as compared to prior to administration. In some embodiments, the intraocular pressure is decreased by no more than about 20%, no more than about 30%, no more than about 40%, no more than about 50%, no more than about 60%, no more than about 70%, no more than about 80%, no more than about 90%, or no more than about 100% as compared to prior to administration. In some embodiments, the intraocular pressure is decreased by 2.5%, 5%, 7.5%, 10%, 20%, 30%, 40%, 50%, 60%, 70%, 80%, 90%, or 100%, or by a range defined by any of the two aforementioned percentages.

[0086] Modification Patterns

[0087] In some embodiments, the composition comprises an oligonucleotide that inhibits the expression of ANGPTL7, wherein the oligonucleotide comprises a modification comprising a modified nucleoside and/or a modified internucleoside linkage, and/or (ii) the composition comprises a pharmaceutically acceptable carrier. In some embodiments, the oligonucleotide comprises a modification comprising a modified nucleoside and/or a modified internucleoside linkage. In some embodiments, the oligonucleotide comprises a modified internucleoside linkage. In some embodiments, the modified internucleoside linkage comprises alkylphosphonate, phosphorothioate, methylphosphonate, phosphorodithioate, alkylphosphonothioate, phosphoramidate, carbamate, carbonate, phosphate triester, acetamidate, or carboxymethyl ester, or a combination thereof. In some embodiments, the modified internucleoside linkage comprises one or more phosphorothioate linkages. Benefits of the modified internucleoside linkage may include decreased toxicity or improved pharmacokinetics. The composition (e.g. oligonucleotide composition) may comprise or consist of a dsRNA agent described herein. The composition (e.g. oligonucleotide composition) may comprise or consist of an siRNA described herein.

[0088] In some embodiments, the composition comprises an oligonucleotide that inhibits the expression of ANGPTL7, wherein the oligonucleotide comprises a modified internucleoside linkage, wherein the oligonucleotide comprises 1, 2, 3, 4, 5, 6, 7, 8, 9, 10, 11, 12, 13, 14, 15, 16, 17, 18, 19, or 20 modified internucleoside linkages, or a range of modified internucleoside linkages defined by any two of the aforementioned numbers. In some embodiments, the oligonucleotide comprises no more than 18 modified internucleoside linkages. In some embodiments, the oligonucleotide comprises no more than 20 modified internucleoside linkages. In some embodiments, the oligonucleotide comprises 2 or more modified internucleoside linkages, 3 or more modified internucleoside linkages, 4 or more modified internucleoside linkages, 5 or more modified internucleoside linkages, 6 or more modified internucleoside linkages, 7 or more modified internucleoside linkages, 8 or more modified internucleoside linkages, 9 or more modified internucleoside linkages, 10 or more modified internucleoside linkages, 11 or more modified internucleoside linkages, 12 or more modified internucleoside linkages, 13 or more modified internucleoside linkages, 14 or more modified internucleoside linkages, 15 or more modified internucleoside linkages, 16 or more modified internucleoside linkages, 17 or more modified internucleoside linkages, 18 or more modified internucleoside linkages, 19 or more modified internucleoside linkages, or 20 or more modified internucleoside linkages.

[0089] In some embodiments, the composition comprises an oligonucleotide that inhibits the expression of ANGPTL7, wherein the oligonucleotide comprises the modified nucleoside. In some embodiments, the modified nucleoside comprises a locked nucleic acid (LNA), hexitol nucleic acid (HLA), cyclohexene nucleic acid (CeNA), 2′-methoxyethyl, 2′-O-alkyl, 2′-O-allyl, 2′-fluoro, or 2′-deoxy, or a combination thereof. In some embodiments, the modified nucleoside comprises a LNA. In some embodiments, the modified nucleoside comprises a 2′,4′ constrained ethyl nucleic acid. In some embodiments, the modified nucleoside comprises HLA. In some embodiments, the modified nucleoside comprises CeNA. In some embodiments, the modified nucleoside comprises a 2′-methoxyethyl group. In some embodiments, the modified nucleoside comprises a 2′-O-alkyl group. In some embodiments, the modified nucleoside comprises a 2′-O-allyl group. In some embodiments, the modified nucleoside comprises a 2′-fluoro group. In some embodiments, the modified nucleoside comprises a 2′-deoxy group. In some embodiments, the modified nucleoside comprises a 2′-O-methyl nucleoside, 2′-deoxyfluoro nucleoside, 2′-O—N-methylacetamido (2′-O-NMA) nucleoside, a 2′-O-dimethylaminoethoxyethyl (2′-O-DMAEOE) nucleoside, 2′-O-aminopropyl (2′-O-AP) nucleoside, or 2′-ara-F, or a combination thereof. In some embodiments, the modified nucleoside comprises a 2′-O-methyl nucleoside. In some embodiments, the modified nucleoside comprises a 2′-deoxyfluoro nucleoside. In some embodiments, the modified nucleoside comprises a 2′-O-NMA nucleoside. In some embodiments, the modified nucleoside comprises a 2′-O-DMAEOE nucleoside. In some embodiments, the modified nucleoside comprises a 2′-O-aminopropyl (2′-O-AP) nucleoside. In some embodiments, the modified nucleoside comprises 2′-ara-F. In some embodiments, the modified nucleoside comprises one or more 2′-fluoro modified nucleosides. In some embodiments, the modified nucleoside comprises a 2′-O-alkyl modified nucleoside. Benefits of the modified nucleoside may include decreased toxicity or improved pharmacokinetics.

[0090] In some embodiments, the oligonucleotide comprises 1, 2, 3, 4, 5, 6, 7, 8, 9, 10, 11, 12, 13, 14, 15, 16, 17, 18, 19, 20, or 21 modified nucleosides, or a range of nucleosides defined by any two of the aforementioned numbers. In some embodiments, the oligonucleotide comprises no more than 19 modified nucleosides. In some embodiments, the oligonucleotide comprises no more than 21 modified nucleosides. In some embodiments, the oligonucleotide comprises 2 or more modified nucleosides, 3 or more modified nucleosides, 4 or more modified nucleosides, 5 or more modified nucleosides, 6 or more modified nucleosides, 7 or more modified nucleosides, 8 or more modified nucleosides, 9 or more modified nucleosides, 10 or more modified nucleosides, 11 or more modified nucleosides, 12 or more modified nucleosides, 13 or more modified nucleosides, 14 or more modified nucleosides, 15 or more modified nucleosides, 16 or more modified nucleosides, 17 or more modified nucleosides, 18 or more modified nucleosides, 19 or more modified nucleosides, 20 or more modified nucleosides, or 21 or more modified nucleosides.

[0091] In some embodiments, the composition comprises an oligonucleotide that inhibits the expression of ANGPTL7, wherein the oligonucleotide comprises a moiety attached at a 3′ or 5′ terminus of the oligonucleotide. For example, the moiety may be attached at a 3′ end of an siRNA sense strand, a 3′ end of an siRNA antisense strand, a 3′ end of an ASO, a 5′ end of an siRNA sense strand, a 5′ end of an siRNA antisense strand, or a 5′ end of an ASO. An example of an attachment at a 3′ end includes attachment at a 3′ position of a sugar such as a ribose. In some embodiments, the moiety is attached at a 2′ position of a sugar (e.g. ribose). The moiety may include cholesterol. The moiety may include tetraethyleneglycol. The moiety may include cholesterol-tetraethyleneglycol (CholTEG).

[0092] In some embodiments, the moiety includes a negatively charged group attached at a 5′ end of the oligonucleotide. This may be referred to as a 5′-end group. In some embodiments, the negatively charged group is attached at a 5′ end of an antisense strand of an siRNA disclosed herein. The 5′-end group may be or include a 5′-end phosphorothioate, 5′-end phosphorodithioate, 5′-end vinylphosphonate (5′-VP), 5′-end methylphosphonate, 5′-end cyclopropyl phosphonate, or a 5′-deoxy-5′-C-malonyl. The 5′-end group may comprise 5′-VP. In some embodiments, the 5′-VP comprises a trans-vinylphosphate or cis-vinylphosphate. The 5′-end group may include an extra 5′ phosphate. A combination of 5′-end groups may be used.

[0093] In some embodiments, a hydrophobic moiety is attached to the oligonucleotide (e.g. a sense strand and/or an antisense strand of a siRNA). In some embodiments, a hydrophobic moiety is attached at a 3′ terminus of the oligonucleotide. In some embodiments, a hydrophobic moiety is attached at a 5′ terminus of the oligonucleotide. In some embodiments, the hydrophobic moiety comprises cholesterol.

[0094] In some embodiments, the composition comprises an oligonucleotide that inhibits the expression of ANGPTL7, wherein the oligonucleotide comprises a lipid attached at a 3′ or 5′ terminus of the oligonucleotide. In some embodiments, a lipid is attached at a 3′ terminus of the oligonucleotide. In some embodiments, a lipid is attached at a 5′ terminus of the oligonucleotide. In some embodiments, the lipid comprises cholesterol, myristoyl, palmitoyl, stearoyl, lithocholoyl, docosanoyl, docosahexaenoyl, myristyl, palmityl stearyl, or α-tocopherol, or a combination thereof. In some embodiments, the lipid comprises cholesterol. In some embodiments, the lipid includes a sterol such as cholesterol. The lipid may be attached to the oligonucleotide by a linker. The linker may include a polyethyleneglycol (e.g. tetraethyleneglycol).

[0095] In some embodiments, the composition comprises an arginine-glycine-aspartic acid (RGD) peptide. In some embodiments, the RGD peptide is attached at a 3′ terminus of the oligonucleotide. In some embodiments, the RGD peptide is attached at a 5′ terminus of the oligonucleotide. In some embodiments, the composition comprises a sense strand, and the RGD peptide is attached to the sense strand (e.g. attached to a 5′ end of the sense strand, or attached to a 3′ end of the sense strand). In some embodiments, the composition comprises an antisense strand, and the RGD peptide is attached to the antisense strand (e.g. attached to a 5′ end of the antisense strand, or attached to a 3′ end of the antisense strand). In some embodiments, the composition comprises an RGD peptide attached at a 3′ or 5′ terminus of the oligonucleotide. In some embodiments, the oligonucleotide comprises an RGD peptide and a lipid attached at a 3′ or 5′ terminus of the oligonucleotide. The RGD peptide may be attached to the oligonucleotide by a linker. The linker may include a polyethyleneglycol. In some embodiments, the RGD peptide comprises Cyclo(-Arg-Gly-Asp-D-Phe-Cys). In some embodiments, the RGD peptide comprises Cyclo(-Arg-Gly-Asp-D-Phe-Lys). In some embodiments, the RGD peptide comprises Cyclo(-Arg-Gly-Asp-D-Phe-azido). In some embodiments, the RGD peptide comprises an amino benzoic acid derived RGD. In some embodiments, the RGD peptide comprises Cyclo(-Arg-Gly-Asp-D-Phe-Cys), Cyclo(-Arg-Gly-Asp-D-Phe-Lys), Cyclo(-Arg-Gly-Asp-D-Phe-azido), an amino benzoic acid derived RGD, or a combination thereof. In some embodiments, the RGD peptide comprises multiple of such RGD peptides. For example, the RGD peptide may include 2, 3, or 4 RGD peptides.

[0096] In some embodiments, a modification or modification pattern disclosed herein includes a cholesterol moiety.

[0097] In some embodiments, the oligonucleotide comprises a dsRNA agent described herein. In some embodiments, the oligonucleotide comprises an siRNA described herein. In some embodiments, one or more nucleotides in the sense and/or antisense strand of a dsRNA agent, or siRNA, is modified in accordance with any of the modifications or modification patterns described herein.

[0098] The oligonucleotide may include purines. Examples of purines include adenine (A) or guanine (G), or modified versions thereof. The oligonucleotide may include pyrimidines. Examples of pyrimidines include cytosine (C), thymine (T), or uracil (U), or modified versions thereof.

[0099] In some embodiments, purines of the oligonucleotide comprise 2′-fluoro modified purines. In some embodiments, purines of the oligonucleotide comprise 2′-O-methyl modified purines. In some embodiments, purines of the oligonucleotide comprise a mixture of 2′-fluoro and 2′-O-methyl modified purines. In some embodiments, all purines of the oligonucleotide comprise 2′-fluoro modified purines. In some embodiments, all purines of the oligonucleotide comprise 2′-O-methyl modified purines. In some embodiments, all purines of the oligonucleotide comprise a mixture of 2′-fluoro and 2′-O-methyl modified purines.

[0100] In some embodiments, pyrimidines of the oligonucleotide comprise 2′-fluoro modified pyrimidines. In some embodiments, pyrimidines of the oligonucleotide comprise 2′-O-methyl modified pyrimidines. In some embodiments, pyrimidines of the oligonucleotide comprise a mixture of 2′-fluoro and 2′-O-methyl modified pyrimidines. In some embodiments, all pyrimidines of the oligonucleotide comprise 2′-fluoro modified pyrimidines. In some embodiments, all pyrimidines of the oligonucleotide comprise 2′-O-methyl modified pyrimidines. In some embodiments, all pyrimidines of the oligonucleotide comprise a mixture of 2′-fluoro and 2′-O-methyl modified pyrimidines.

[0101] In some embodiments, purines of the oligonucleotide comprise 2′-fluoro modified purines, and pyrimidines of the oligonucleotide comprise a mixture of 2′-fluoro and 2′-O-methyl modified pyrimidines. In some embodiments, purines of the oligonucleotide comprise 2′-O-methyl modified purines, and pyrimidines of the oligonucleotide comprise a mixture of 2′-fluoro and 2′-O-methyl modified pyrimidines. In some embodiments, purines of the oligonucleotide comprise 2′-fluoro modified purines, and pyrimidines of the oligonucleotide comprise 2′-O-methyl modified pyrimidines. In some embodiments, purines of the oligonucleotide comprise 2′-O-methyl modified purines, and pyrimidines of the oligonucleotide comprise 2′-fluoro modified pyrimidines. In some embodiments, pyrimidines of the oligonucleotide comprise 2′-fluoro modified pyrimidines, and purines of the oligonucleotide comprise a mixture of 2′-fluoro and 2′-O-methyl modified purines. In some embodiments, pyrimidines of the oligonucleotide comprise 2′-O-methyl modified pyrimidines, and purines of the oligonucleotide comprise a mixture of 2′-fluoro and 2′-O-methyl modified purines. In some embodiments, pyrimidines of the oligonucleotide comprise 2′-fluoro modified pyrimidines, and purines of the oligonucleotide comprise 2′-O-methyl modified purines. In some embodiments, pyrimidines of the oligonucleotide comprise 2′-O-methyl modified pyrimidines, and purines of the oligonucleotide comprise 2′-fluoro modified purines.

[0102] In some embodiments, all purines of the oligonucleotide comprise 2′-fluoro modified purines, and all pyrimidines of the oligonucleotide comprise a mixture of 2′-fluoro and 2′-O-methyl modified pyrimidines. In some embodiments, all purines of the oligonucleotide comprise 2′-O-methyl modified purines, and all pyrimidines of the oligonucleotide comprise a mixture of 2′-fluoro and 2′-O-methyl modified pyrimidines. In some embodiments, all purines of the oligonucleotide comprise 2′-fluoro modified purines, and all pyrimidines of the oligonucleotide comprise 2′-O-methyl modified pyrimidines. In some embodiments, all purines of the oligonucleotide comprise 2′-O-methyl modified purines, and all pyrimidines of the oligonucleotide comprise 2′-fluoro modified pyrimidines. In some embodiments, all pyrimidines of the oligonucleotide comprise 2′-fluoro modified pyrimidines, and all purines of the oligonucleotide comprise a mixture of 2′-fluoro and 2′-O-methyl modified purines. In some embodiments, all pyrimidines of the oligonucleotide comprise 2′-O-methyl modified pyrimidines, and all purines of the oligonucleotide comprise a mixture of 2′-fluoro and 2′-O-methyl modified purines. In some embodiments, all pyrimidines of the oligonucleotide comprise 2′-fluoro modified pyrimidines, and all purines of the oligonucleotide comprise 2′-O-methyl modified purines. In some embodiments, all pyrimidines of the oligonucleotide comprise 2′-O-methyl modified pyrimidines, and all purines of the oligonucleotide comprise 2′-fluoro modified purines.

[0103] dsRNA Agent

[0104] In some embodiments, the composition comprises a double-stranded RNAi (dsRNA) agent. In one aspect, provided herein is a dsRNA agent capable of inhibiting the expression of ANGPTL7. The dsRNA agent comprises a sense strand and an antisense strand. In some cases, the sense strand comprises a sequence at least about 80%, 85%, 90%, 95%, or 100% identical to a sequence selected from SEQ ID NOS: 1-4412. In some cases, the sense strand comprises a sequence at least about 80%, 85%, 90%, 95% or 100% identical to a sequence selected from SEQ ID NOS: 11450-11474. In some cases, the antisense strand comprises a sequence at least about 80%, 85%, 90%, 95%, or 100% identical to the reverse complement of the sense strand. In some cases, the antisense strand comprises a sequence at least about 80%, 85%, 90%, 95%, or 100% identical to a sequence selected from SEQ ID NOS: 1-4412. In some cases, the antisense strand comprises a sequence at least about 80%, 85%, 90%, 95%, or 100% identical to a sequence selected from SEQ ID NOS: 11475-11499.

[0105] In some cases, each strand of the dsRNA agent can range from 12-30 nucleotides in length. For example, each strand can be between 14-30 nucleotides in length, 17-30 nucleotides in length, 25-30 nucleotides in length, 27-30 nucleotides in length, 17-23 nucleotides in length, 17-21 nucleotides in length, 17-19 nucleotides in length, 19-25 nucleotides in length, 19-23 nucleotides in length, 19-21 nucleotides in length, 21-25 nucleotides in length, or 21-23 nucleotides in length.

[0106] The sense strand and antisense strand typically form a duplex dsRNA. The duplex region of a dsRNA agent may be 12-30 nucleotide pairs in length. For example, the duplex region can be between 14-30 nucleotide pairs in length, 17-30 nucleotide pairs in length, 25-30 nucleotides in length, 27-30 nucleotide pairs in length, 17-23 nucleotide pairs in length, 17-21 nucleotide pairs in length, 17-19 nucleotide pairs in length, 19-25 nucleotide pairs in length, 19-23 nucleotide pairs in length, 19-21 nucleotide pairs in length, 21-25 nucleotide pairs in length, or 21-23 nucleotide pairs in length. In another example, the duplex region has a length of about 15, 16, 17, 18, 19, 20, 21, 22, 23, 24, 25, 26, and 27.

[0107] In some embodiments, the dsRNA agent comprises one or more overhang regions and/or capping groups at the 3′-end, or 5′-end, or both ends of a strand. In some cases, the overhang is about 1-6 nucleotides in length, for instance 2-6 nucleotides in length, 1-5 nucleotides in length, 2-5 nucleotides in length, 1-4 nucleotides in length, 2-4 nucleotides in length, 1-3 nucleotides in length, 2-3 nucleotides in length, or 1-2 nucleotides in length. The overhang can be the result of one strand being longer than the other, or the result of two strands of the same length being staggered. The overhang can form a mismatch with the target mRNA or it can be complementary to the gene sequences being targeted or can be other sequence. The first and second strands can also be joined, e.g., by additional bases to form a hairpin, or by other non-base linkers.

[0108] Described herein, in some embodiments, are compositions comprising an RNA interference (RNAi) agent. In some embodiments, the RNAi agent is capable of inhibiting or modulating the expression of angiopoietin-like 7 (ANGPTL7). In some embodiments, the RNAi agent comprises a siRNA described herein. In some embodiments, the RNAi agent comprises a double-stranded RNA (dsRNA). In some embodiments, the dsRNA comprises a sense strand and an antisense strand (such as a sense strand and/or an antisense strand described herein). In some embodiments, the antisense strand is complementary to a portion of a nucleic acid having the nucleoside sequence of SEQ ID NO: 11085. In some embodiments, the antisense strand is complementary to a portion of a nucleic acid having the nucleoside sequence of SEQ ID NO: 11086. In some embodiments, each strand has 14 to 30 nucleotides.

[0109] Described herein, in some embodiments, are compositions comprising an RNA interference (RNAi) agent capable of inhibiting or modulating the expression of angiopoietin like 7 (ANGPTL7); wherein the RNAi agent comprises a double-stranded RNA (dsRNA) comprising a sense strand and an antisense strand, the antisense strand being complementary to a portion of a nucleic acid having the nucleoside sequence of SEQ ID NO: 11085, and each strand having 14 to 30 nucleotides.

[0110] Described herein, in some embodiments, are compositions comprising an RNA interference (RNAi) agent capable of inhibiting or modulating the expression of angiopoietin-like 7 (ANGPTL7); wherein the RNAi agent comprises a double-stranded RNA (dsRNA) comprising a sense strand and an antisense strand, the antisense strand being complementary to a portion of a nucleic acid having the nucleoside sequence of SEQ ID NO: 11086, and each strand having 14 to 30 nucleotides.

[0111] In some embodiments, the one or more modifications confers nuclease resistance upon the oligonucleotide (e.g. siRNA). In some embodiments, the modification pattern confers nuclease resistance upon the oligonucleotide (e.g. siRNA). For example, modification pattern 1S, 2S, 3S, 4S, 5S, 6S, 7S, 8S, 9S, 10S, 11S, 12S, 13S, 14S, 15S, 16S, 1AS, 2AS, 3AS, 4AS, 6AS, 7AS, 8AS, 9AS, or 10AS, may confer nuclease resistance.

[0112] dsRNA Modifications

[0113] The modifications described herein in reference to dsRNA agents may be applicable to siRNA oligonucleotides described elsewhere herein.

[0114] In some embodiments, one or more nucleotides in the sense and/or antisense strand of a dsRNA agent is modified. In some cases, every nucleotide in the sense strand and antisense strand of the dsRNA is modified. The modifications on sense strand and antisense strand may each independently comprise at least two different modifications. In some cases, not every nucleotide in the sense and antisense strand is modified. In some cases, no nucleotide in the sense and/or antisense strand is modified.

[0115] In some cases, the sense strand contains at least one motif of three identical modifications on three consecutive nucleotides, where at least one of the motifs occurs at or near the cleavage site in the antisense strand. In some cases, the antisense strand contains at least one motif of three identical modifications on three consecutive nucleotides. The modification pattern of the antisense strand may be shifted by one or more nucleotides relative to the modification pattern of the sense strand.

[0116] In some cases, the sense strand contains at least two motifs of three identical modifications on three consecutive nucleotides, when at least one of the motifs occurs at the cleavage site in the strand and at least one of the motifs occurs at another portion of the strand that is separated from the motif at the cleavage site by at least one nucleotide. In some cases, the antisense strand contains at least one motif of three identical modifications on three consecutive nucleotides, where at least one of the motifs occurs at or near the cleavage site in the strand and at least one of the motifs occurs at another portion of the strand that is separated from the motif at or near cleavage site by at least one nucleotide.

[0117] In some cases, the sense strand contains at least two motifs of three identical modifications on three consecutive nucleotides, where at least one of the motifs occurs at the cleavage site in the strand and at least one of the motifs occurs at another portion of the strand that is separated from the motif at the cleavage site by at least one nucleotide. In some cases, the antisense strand contains at least one motif of three identical modifications on three consecutive nucleotides, where at least one of the motifs occurs at or near the cleavage site in the strand and at least one of the motifs occurs at another portion of the strand that is separated from the motif at or near cleavage site by at least one nucleotide. In some cases, the modification in the motif occurring at the cleavage site in the sense strand is different than the modification in the motif occurring at or near the cleavage site in the antisense strand.

[0118] In some cases, the sense strand contains at least one motif of three 2′-F modifications on three consecutive nucleotides, where at least one of the motifs occurs at the cleavage site in the strand. In some cases, the antisense strand contains at least one motif of three 2′-O-methyl modifications on three consecutive nucleotides.

[0119] In some cases, the sense strand comprises one or more motifs of three identical modifications on three consecutive nucleotides, where the one or more additional motifs occur at another portion of the strand that is separated from the three 2′-F modifications at the cleavage site by at least one nucleotide. The antisense strand may comprise one or more motifs of three identical modifications on three consecutive nucleotides, where the one or more additional motifs occur at another portion of the strand that is separated from the three 2′-O-methyl modifications by at least one nucleotide. In some cases, at least one of the nucleotides having a 2′-F modification may form a base pair with one of the nucleotides having a 2′-O-methyl modification.

[0120] In some embodiments, if the dsRNA agent comprises an overhang, the nucleotides in the overhang region of the dsRNA agent can each independently be a modified or unmodified nucleotide. Non-limiting examples of modifications include, but are not limited to, a 2′-sugar modification, such as, 2-F, 2′-Omethyl, thymidine (T), 2′-O-methoxyethyl-5-methyluridine (Teo), 2′-O-methoxyethyladenosine (Aeo), 2′-O-methoxyethyl-5-methylcytidine (m5Ceo), and any combinations thereof. For example, TT can be an overhang sequence for either end on either strand. The overhang can form a mismatch with the target Mrna, or it can be complementary to the gene sequences being targeted or can be other sequence.

[0121] In some embodiments, if the dsRNA agent comprises an overhang, the 5′- and/or 3′-overhang at the sense strand, antisense strand or both strands of the dsRNA agent may be phosphorylated. In some embodiments, the overhang region contains two nucleotides having a phosphorothioate between the two nucleotides, where the two nucleotides can be the same or different. In some embodiments, the overhang is present at the 3′-end of the sense strand, antisense strand or both strands. In some embodiments, this 3′-overhang is present in the antisense strand. In some embodiments, this 3′-overhang is present in the sense strand.

[0122] In some embodiments, the modified dsRNA agent comprises one or more modified nucleotides including, but not limited to, 2′OMe nucleotides, 2′-deoxy-2′-fluoro (2′F) nucleotides, 2′-deoxy nucleotides, 2′-O-(2-methoxyethyl) (MOE) nucleotides, locked nucleic acid (LNA) nucleotides, or combinations thereof. In some embodiments, the modified dsRNA agent comprises 2′OMe nucleotides (e.g., 2′OMe purine and/or pyrimidine nucleotides) such as, for example, 2′OMe-guanosine nucleotides, 2′OMe-uridine nucleotides, 2′OMe-adenosine nucleotides, 2′OMe-cytosine nucleotides, or combinations thereof. In certain instances, the modified dsRNA agent does not comprise 2′OMe-cytosine nucleotides. In some embodiments, the modified dsRNA agent comprises a hairpin loop structure.

[0123] In certain aspects, the modified dsRNA agent has an IC50 less than or equal to ten-fold that of the corresponding unmodified dsRNA (e.g., the modified dsRNA agent has an IC50 that is less than or equal to ten-times the IC50 of the corresponding unmodified dsRNA agent). In some embodiments, the modified dsRNA agent has an IC50 less than or equal to three-fold that of the corresponding unmodified dsRNA agent. In some embodiments, the modified dsRNA agent has an IC50 less than or equal to two-fold that of the corresponding unmodified dsRNA agent. It will be readily apparent to those of skill in the art that a dose response curve can be generated and the IC5 0 values for the modified dsRNA agent and the corresponding unmodified dsRNA agent can be readily determined using methods known to those of skill in the art.

[0124] The modified dsRNA agent may have 3′ overhangs of one, two, three, four, or more nucleotides on one or both sides of the double-stranded region, or may lack overhangs (i.e., have blunt ends). In some cases, the modified dsRNA agent has 3′ overhangs of two nucleotides on each side of the double-stranded region. In certain instances, the 3′ overhang on the antisense strand has complementarity to the target sequence and the 3′ overhang on the sense strand has complementarity to the complementary strand of the target sequence. In some cases, the 3′ overhangs do not have complementarity to the target sequence or the complementary strand thereof. In some embodiments, the 3′ overhangs comprise one, two, three, four, or more nucleotides such as 2′-deoxy(2′H) nucleotides. In some cases, the 3′ overhangs comprise deoxythymidine (dT) nucleotides.

[0125] In some embodiments, the modified dsRNA agent comprises from about 1% to about 100% (e.g., about 1%, 5%, 10%, 15%, 20%, 25%, 30%, 35%, 40%, 45%, 50%, 55%, 60%, 65%, 70%, 75%, 80%, 85%, 90%, 95%, or 100%) modified nucleotides in the double-stranded region of the dsRNA agent. In some embodiments, less than about 30% (e.g., less than about 30%, 25%, 20%, 15%, 10%, or 5%) or from about 1% to about 30% (e.g., from about 1%-30%, 5%-30%, 10%-30%, 15%-30%, 20%-30%, or 25%-30%) of the nucleotides in the double-stranded region of the dsRNA agent comprise modified nucleotides.

[0126] In some embodiments, the dsRNA agent does not comprise phosphate backbone modifications, e.g., in the sense and/or antisense strand of the double-stranded region. In some embodiments, the modified dsRNA agent does not comprise 2′-deoxy nucleotides, e.g., in the sense and/or antisense strand of the double-stranded region. In certain instances, the nucleotide at the 3′-end of the double-stranded region in the sense and/or antisense strand is not a modified nucleotide. In certain instances, the nucleotides near the 3′-end (e.g., within one, two, three, or four nucleotides of the 3′-end) of the double-stranded region in the sense and/or antisense strand are not modified nucleotides.

[0127] The dsRNA agent may have 3′ overhangs of one, two, three, four, or more nucleotides on one or both sides of the double-stranded region, or may lack overhangs (i.e., have blunt ends). In some cases, the dsRNA agent has 3′ overhangs of two nucleotides on each side of the double-stranded region. In some embodiments, the 3′ overhangs comprise one, two, three, four, or more nucleotides such as 2′-deoxy(2′H) nucleotides. In some cases, the 3′ overhangs comprise deoxythymidine (dT) nucleotides.

[0128] The dsRNA agent may also have a blunt end, located at the 5′-end of the antisense strand (or the 3′-end of the sense strand) or vice versa. In some cases, the antisense strand of the dsRNA has a nucleotide overhang at the 3′-end, and the 5′-end is blunt. While not bound by theory, the asymmetric blunt end at the 5′-end of the antisense strand and 3′-end overhang of the antisense strand may favor the guide strand loading into RISC process.

[0129] In some embodiments, the dsRNA agent may also have two blunt ends, at both ends of the dsRNA duplex.

[0130] In some embodiments, every nucleotide in the sense strand and antisense strand of the dsRNA agent, including the nucleotides that are part of the motifs, may be modified. Each nucleotide may be modified with the same or different modification which can include one or more alteration of one or both of the non-linking phosphate oxygens and/or of one or more of the linking phosphate oxygens; alteration of a constituent of the ribose sugar, e.g., of the 2′ hydroxyl on the ribose sugar; wholesale replacement of the phosphate moiety with “dephospho” linkers; modification or replacement of a naturally occurring base; and replacement or modification of the ribose-phosphate backbone. In some embodiments, fewer than all nucleotides in the sense and antisense strand are modified.

[0131] As nucleic acids are polymers of subunits, in some cases, many of the modifications occur at a position which is repeated within a nucleic acid, e.g., a modification of a base, or a phosphate moiety, or a non-linking 0 of a phosphate moiety. In some cases, the modification will occur at all of the subject positions in the nucleic acid, but in other cases, it will not. By way of example, a modification may only occur at a 3′ or 5′ terminal position, may only occur in a terminal region, e.g., at a position on a terminal nucleotide or in the last 2, 3, 4, 5, or 10 nucleotides of a strand. A modification may occur in a double strand region, a single strand region, or in both. A modification may occur only in the double strand region of a R A or may only occur in a single strand region of a RNA. For example, a phosphorothioate modification at a non-linking 0 position may only occur at one or both termini, may only occur in a terminal region, e.g., at a position on a terminal nucleotide or in the last 2, 3, 4, 5, or 10 nucleotides of a strand, or may occur in double strand and single strand regions, particularly at termini. The 5′ end or ends can be phosphorylated.

[0132] It may be possible, e.g., to enhance stability, to include particular bases in overhangs, or to include modified nucleotides or nucleotide surrogates, in single strand overhangs, e.g., in a 5′ or 3′ overhang, or in both. For example, purine nucleotides may be included in overhangs. In some embodiments all or some of the bases in a 3′ or 5′ overhang may be modified, e.g., with a modification described herein. Modifications can include, e.g., the use of modifications at the 2′ position of the ribose sugar with modifications that are known in the art, e.g., the use of deoxyribonucleotides, 2′-deoxy-2′-fluoro (2′-F) or 2′-O-methyl modified instead of the ribosugar of the nucleobase, and modifications in the phosphate group, e.g., phosphorothioate modifications. In some cases, overhangs need not be homologous with the target sequence.

[0133] In some embodiments, each residue of the sense strand and antisense strand is independently modified with LNA, HNA, CeNA, 2′-methoxyethyl, 2′-O-allyl, 2′-C-allyl, 2′-deoxy, or 2′-fluoro. The strands can contain more than one modification. In some embodiments, each residue of the sense strand and antisense strand is independently modified with 2′-O-methyl or 2′-fluoro.

[0134] In some embodiments, at least two different modifications are present on the sense strand and antisense strand. Those two modifications may be the 2′-O-methyl or 2′-fluoro modifications, or others.

[0135] In some embodiments, the sense strand and antisense strand each contains two differently modified nucleotides selected from 2′-O-methyl or 2′-fluoro.

[0136] In some embodiments, each residue of the sense strand and antisense strand is independently modified with 2′-O-methyl nucleotide, 2′-deoxyfluoro nucleotide, 2-O—N-methylacetamido (2′-O-NMA) nucleotide, a 2′-O-dimethylaminoethoxyethyl (2′-O-DMAEOE) nucleotide, 2′-O-aminopropyl (2′-O-AP) nucleotide, or 2′-ara-F nucleotide.

[0137] The type of modifications contained in an alternating motif may be the same or different. For example, if A, B, C, D each represent one type of modification on the nucleotide, the alternating pattern, i.e., modifications on every other nucleotide, may be the same, but each of the sense strand or antisense strand can be selected from several possibilities of modifications within the alternating motif such as “ABABAB . . . ”, “ACACAC . . . ” “BDBDBD . . . ” or “CDCDCD,” etc.

[0138] In some embodiments, the dsRNA agent comprises the modification pattern for the alternating motif on the sense strand relative to the modification pattern for the alternating motif on the antisense strand is shifted. The shift may be such that the modified group of nucleotides of the sense strand corresponds to a differently modified group of nucleotides of the antisense strand and vice versa. For example, the sense strand when paired with the antisense strand in the dsRNA duplex, the alternating motif in the sense strand may start with “ABABAB” from 5′-3′ of the strand and the alternating motif in the antisense strand may start with “BABABA” from 3′-5 of the strand within the duplex region. As another example, the alternating motif in the sense strand may start with “AABBAABB” from 5′-3′ of the strand and the alternating motif in the antisense strand may start with “BBAABBAA” from 3′-5 Of the strand within the duplex region, so that there is a complete or partial shift of the modification patterns between the sense strand and the antisense strand.

[0139] In some embodiments, the dsRNA agent comprises the pattern of the alternating motif of 2′-O-methyl modification and 2′-F modification on the sense strand initially has a shift relative to the pattern of the alternating motif of 2′-O-methyl modification and 2′-F modification on the antisense strand initially, i.e., the 2′-O-methyl modified nucleotide on the sense strand base pairs with a 2′-F modified nucleotide on the antisense strand and vice versa. The 1 position of the sense strand may start with the 2′-F modification, and the 1 position of the antisense strand may start with the 2′-O-methyl modification. The introduction of one or more motifs of three identical modifications on three consecutive nucleotides to the sense strand and/or antisense strand interrupts the initial modification pattern present in the sense strand and/or antisense strand. This interruption of the modification pattern of the sense and/or antisense strand by introducing one or more motifs of three identical modifications on three consecutive nucleotides to the sense and/or antisense strand may enhance the gene silencing activity to the target gene.

[0140] The dsRNA agent may comprise at least one phosphorothioate or methylphosphonate internucleotide linkage. The phosphorothioate or methylphosphonate internucleotide linkage modification may occur on any nucleotide of the sense strand or antisense strand or both in any position of the strand. For instance, the internucleotide linkage modification may occur on every nucleotide on the sense strand and/or antisense strand; each internucleotide linkage modification may occur in an alternating pattern on the sense strand or antisense strand; or the sense strand or antisense strand comprises both internucleotide linkage modifications in an alternating pattern. The alternating pattern of the internucleotide linkage modification on the sense strand may be the same or different from the antisense strand, and the alternating pattern of the internucleotide linkage modification on the sense strand may have a shift relative to the alternating pattern of the internucleotide linkage modification on the antisense strand.

[0141] In some embodiments, the dsRNA comprises the phosphorothioate or methylphosphonate internucleotide linkage modification in the overhang region. For example, the overhang region comprises two nucleotides having a phosphorothioate or methylphosphonate internucleotide linkage between the two nucleotides. Internucleotide linkage modifications also may be made to link the overhang nucleotides with the terminal paired nucleotides within duplex region. For example, at least 2, 3, 4, or all the overhang nucleotides may be linked through phosphorothioate or methylphosphonate internucleotide linkage, and optionally, there may be additional phosphorothioate or methylphosphonate internucleotide linkages linking the overhang nucleotide with a paired nucleotide that is next to the overhang nucleotide. For instance, there may be at least two phosphorothioate internucleotide linkages between the terminal three nucleotides, in which two of the three nucleotides are overhang nucleotides, and the third is a paired nucleotide next to the overhang nucleotide. In some cases, these terminal three nucleotides may be at the 3′-end of the antisense strand.

[0142] In some embodiments the sense strand of the dsRNA agent comprises 1-10 blocks of two to ten phosphorothioate or methylphosphonate internucleotide linkages separated by about 1, 2, 3, 4, 5, 6, 7, 8, 9, 10, 11, 12, 13, 14, 15 or 16 phosphate internucleotide linkages, wherein one of the phosphorothioate or methylphosphonate internucleotide linkages is placed at any position in the oligonucleotide sequence and the said sense strand is paired with an antisense strand comprising any combination of phosphorothioate, methylphosphonate and phosphate internucleotide linkages or an antisense strand comprising either phosphorothioate or methylphosphonate or phosphate linkage.

[0143] In some embodiments the antisense strand of the dsRNA agent comprises two blocks of two phosphorothioate or methylphosphonate internucleotide linkages separated by about 1, 2, 3, 4, 5, 6, 7, 8, 9, 10, 11, 12, 13, 14, 15, 16, 17, or 18 phosphate internucleotide linkages, wherein one of the phosphorothioate or methylphosphonate internucleotide linkages is placed at any position in the oligonucleotide sequence and the said antisense strand is paired with a sense strand comprising any combination of phosphorothioate, methylphosphonate and phosphate internucleotide linkages or an antisense strand comprising either phosphorothioate or methylphosphonate or phosphate linkage.

[0144] In some embodiments the antisense strand of the dsRNA agent comprises two blocks of three phosphorothioate or methylphosphonate internucleotide linkages separated by about 1, 2, 3, 4, 5, 6, 7, 8, 9, 10, 11, 12, 13, 14, 15 or 16 phosphate internucleotide linkages, wherein one of the phosphorothioate or methylphosphonate internucleotide linkages is placed at any position in the oligonucleotide sequence and the said antisense strand is paired with a sense strand comprising any combination of phosphorothioate, methylphosphonate and phosphate internucleotide linkages or an antisense strand comprising either phosphorothioate or methylphosphonate or phosphate linkage.

[0145] In some embodiments the antisense strand of the dsRNA agent comprises two blocks of four phosphorothioate or methylphosphonate internucleotide linkages separated by about 1, 2, 3, 4, 5, 6, 7, 8, 9, 10, 11, 12, 13 or 14 phosphate internucleotide linkages, wherein one of the phosphorothioate or methylphosphonate internucleotide linkages is placed at any position in the oligonucleotide sequence and the said antisense strand is paired with a sense strand comprising any combination of phosphorothioate, methylphosphonate and phosphate internucleotide linkages or an antisense strand comprising either phosphorothioate or methylphosphonate or phosphate linkage.

[0146] In some embodiments the antisense strand of the dsRNA agent comprises two blocks of five phosphorothioate or methylphosphonate internucleotide linkages separated by about 1, 2, 3, 4, 5, 6, 7, 8, 9, 10, 11 or 12 phosphate internucleotide linkages, wherein one of the phosphorothioate or methylphosphonate internucleotide linkages is placed at any position in the oligonucleotide sequence and the said antisense strand is paired with a sense strand comprising any combination of phosphorothioate, methylphosphonate and phosphate internucleotide linkages or an antisense strand comprising either phosphorothioate or methylphosphonate or phosphate linkage.

[0147] In some embodiments the antisense strand of the dsRNA agent comprises two blocks of six phosphorothioate or methylphosphonate internucleotide linkages separated by about 1, 2, 3, 4, 5, 6, 7, 8, 9 or 10 phosphate internucleotide linkages, wherein one of the phosphorothioate or methylphosphonate internucleotide linkages is placed at any position in the oligonucleotide sequence and the said antisense strand is paired with a sense strand comprising any combination of phosphorothioate, methylphosphonate and phosphate internucleotide linkages or an antisense strand comprising either phosphorothioate or methylphosphonate or phosphate linkage.

[0148] In some embodiments the antisense strand of the dsRNA agent comprises two blocks of seven phosphorothioate or methylphosphonate internucleotide linkages separated by about 1, 2, 3, 4, 5, 6, 7 or 8 phosphate internucleotide linkages, wherein one of the phosphorothioate or methylphosphonate internucleotide linkages is placed at any position in the oligonucleotide sequence and the said antisense strand is paired with a sense strand comprising any combination of phosphorothioate, methylphosphonate and phosphate internucleotide linkages or an antisense strand comprising either phosphorothioate or methylphosphonate or phosphate linkage.

[0149] In some embodiments the antisense strand of the dsRNA agent comprises two blocks of eight phosphorothioate or methylphosphonate internucleotide linkages separated by about 1, 2, 3, 4, 5 or 6 phosphate internucleotide linkages, wherein one of the phosphorothioate or methylphosphonate internucleotide linkages is placed at any position in the oligonucleotide sequence and the said antisense strand is paired with a sense strand comprising any combination of phosphorothioate, methylphosphonate and phosphate internucleotide linkages or an antisense strand comprising either phosphorothioate or methylphosphonate or phosphate linkage.

[0150] In some embodiments the antisense strand of the dsRNA agent comprises two blocks of nine phosphorothioate or methylphosphonate internucleotide linkages separated by about 1, 2, 3 or 4 phosphate internucleotide linkages, wherein one of the phosphorothioate or methylphosphonate internucleotide linkages is placed at any position in the oligonucleotide sequence and the said antisense strand is paired with a sense strand comprising any combination of phosphorothioate, methylphosphonate and phosphate internucleotide linkages or an antisense strand comprising either phosphorothioate or methylphosphonate or phosphate linkage.

[0151] In some embodiments, the dsRNA agent comprises one or more phosphorothioate or methylphosphonate internucleotide linkage modification within 1-10 of the termini position(s) of the sense and/or antisense strand. For example, at least about 2, 3, 4, 5, 6, 7, 8, 9 or 10 nucleotides may be linked through phosphorothioate or methylphosphonate internucleotide linkage at one end or both ends of the sense and/or antisense strand.

[0152] In some embodiments, the dsRNA agent comprises one or more phosphorothioate or methylphosphonate internucleotide linkage modification within 1-10 of the internal region of the duplex of each of the sense and/or antisense strand. For example, at least about 2, 3, 4, 5, 6, 7, 8, 9 or 10 nucleotides may be linked through phosphorothioate methylphosphonate internucleotide linkage at position 8-16 of the duplex region counting from the 5′-end of the sense strand; the dsRNA can optionally further comprise one or more phosphorothioate or methylphosphonate internucleotide linkage modification within 1-10 of the termini position(s).

[0153] In some embodiments, the dsRNA agent comprises one to five phosphorothioate or methylphosphonate internucleotide linkage modification(s) within position 1-5 and one to five phosphorothioate or methylphosphonate internucleotide linkage modification(s) within position 18-23 of the sense strand (counting from the 5′-end), and one to five phosphorothioate or methylphosphonate internucleotide linkage modification at positions 1 and 2 and one to five within positions 18-23 of the antisense strand (counting from the 5′-end).

[0154] In some embodiments, the dsRNA agent comprises one phosphorothioate internucleotide linkage modification within position 1-5 and one phosphorothioate or methylphosphonate internucleotide linkage modification within position 18-23 of the sense strand (counting from the 5′-end), and one phosphorothioate internucleotide linkage modification at positions 1 and 2 and two phosphorothioate or methylphosphonate internucleotide linkage modifications within positions 18-23 of the antisense strand (counting from the 5′-end).

[0155] In some embodiments, the dsRNA agent comprises two phosphorothioate internucleotide linkage modifications within position 1-5 and one phosphorothioate internucleotide linkage modification within position 18-23 of the sense strand (counting from the 5′-end), and one phosphorothioate internucleotide linkage modification at positions 1 and 2 and two phosphorothioate internucleotide linkage modifications within positions 18-23 of the antisense strand (counting from the 5′-end).

[0156] In some embodiments, the dsRNA agent comprises two phosphorothioate internucleotide linkage modifications within position 1-5 and two phosphorothioate internucleotide linkage modifications within position 18-23 of the sense strand (counting from the 5′-end), and one phosphorothioate internucleotide linkage modification at positions 1 and 2 and two phosphorothioate internucleotide linkage modifications within positions 18-23 of the antisense strand (counting from the 5′-end). In some embodiments, the dsRNA agent comprises two phosphorothioate internucleotide linkage modifications within position 1-5 and two phosphorothioate internucleotide linkage modifications within position 18-23 of the sense strand (counting from the 5′-end), and one phosphorothioate internucleotide linkage modification at positions 1 and 2 and one phosphorothioate internucleotide linkage modification within positions 18-23 of the antisense strand (counting from the 5′-end).

[0157] In some embodiments, the dsRNA agent comprises one phosphorothioate internucleotide linkage modification within position 1-5 and one phosphorothioate internucleotide linkage modification within position 18-23 of the sense strand (counting from the 5′-end), and two phosphorothioate internucleotide linkage modifications at positions 1 and 2 and two phosphorothioate internucleotide linkage modifications within positions 18-23 of the antisense strand (counting from the 5′-end).

[0158] In some embodiments, the dsRNA agent comprises one phosphorothioate internucleotide linkage modification within position 1-5 and one within position 18-23 of the sense strand (counting from the 5′-end), and two phosphorothioate internucleotide linkage modification at positions 1 and 2 and one phosphorothioate internucleotide linkage modification within positions 18-23 of the antisense strand (counting from the 5′-end).

[0159] In some embodiments, the dsRNA agent comprises one phosphorothioate internucleotide linkage modification within position 1-5 (counting from the 5′-end), and two phosphorothioate internucleotide linkage modifications at positions 1 and 2 and one phosphorothioate internucleotide linkage modification within positions 18-23 of the antisense strand (counting from the 5′-end).

[0160] In some embodiments, the dsRNA agent comprises two phosphorothioate internucleotide linkage modifications within position 1-5 (counting from the 5′-end), and one phosphorothioate internucleotide linkage modification at positions 1 and 2 and two phosphorothioate internucleotide linkage modifications within positions 18-23 of the antisense strand (counting from the 5′-end).

[0161] In some embodiments, the dsRNA agent comprises two phosphorothioate internucleotide linkage modifications within position 1-5 and one within position 18-23 of the sense strand (counting from the 5′-end), and two phosphorothioate internucleotide linkage modifications at positions 1 and 2 and one phosphorothioate internucleotide linkage modification within positions 18-23 of the antisense strand (counting from the 5′-end).

[0162] In some embodiments, the dsRNA agent comprises two phosphorothioate internucleotide linkage modifications within position 1-5 and one phosphorothioate internucleotide linkage modification within position 18-23 of the sense strand (counting from the 5′-end), and two phosphorothioate internucleotide linkage modifications at positions 1 and 2 and two phosphorothioate internucleotide linkage modifications within positions 18-23 of the antisense strand (counting from the 5′-end).

[0163] In some embodiments, the dsRNA agent comprises two phosphorothioate internucleotide linkage modifications within position 1-5 and one phosphorothioate internucleotide linkage modification within position 18-23 of the sense strand (counting from the 5′-end), and one phosphorothioate internucleotide linkage modification at positions 1 and 2 and two phosphorothioate internucleotide linkage modifications within positions 18-23 of the antisense strand (counting from the 5′-end).

[0164] In some embodiments, the dsRNA agent comprises two phosphorothioate internucleotide linkage modifications at position 1 and 2, and two phosphorothioate internucleotide linkage modifications at position 20 and 21 of the sense strand (counting from the 5′-end), and one phosphorothioate internucleotide linkage modification at positions 1 and one at position 21 of the antisense strand (counting from the 5′-end).

[0165] In some embodiments, the dsRNA agent comprises one phosphorothioate internucleotide linkage modification at position 1, and one phosphorothioate internucleotide linkage modification at position 21 of the sense strand (counting from the 5′-end), and two phosphorothioate internucleotide linkage modifications at positions 1 and 2 and two phosphorothioate internucleotide linkage modifications at positions 20 and 21 the antisense strand (counting from the 5′-end).

[0166] In some embodiments, the dsRNA agent comprises two phosphorothioate internucleotide linkage modifications at position 1 and 2, and two phosphorothioate internucleotide linkage modifications at position 21 and 22 of the sense strand (counting from the 5′-end), and one phosphorothioate internucleotide linkage modification at positions 1 and one phosphorothioate internucleotide linkage modification at position 21 of the antisense strand (counting from the 5′-end).

[0167] In some embodiments, the dsRNA agent comprises one phosphorothioate internucleotide linkage modification at position 1, and one phosphorothioate internucleotide linkage modification at position 21 of the sense strand (counting from the 5′-end), and two phosphorothioate internucleotide linkage modifications at positions 1 and 2 and two phosphorothioate internucleotide linkage modifications at positions 21 and 22 the antisense strand (counting from the 5′-end).

[0168] In some embodiments, the dsRNA agent comprises two phosphorothioate internucleotide linkage modifications at position 1 and 2, and two phosphorothioate internucleotide linkage modifications at position 22 and 23 of the sense strand (counting from the 5′-end), and one phosphorothioate internucleotide linkage modification at positions 1 and one phosphorothioate internucleotide linkage modification at position 21 of the antisense strand (counting from the 5′-end).

[0169] In some embodiments, the dsRNA agent comprises one phosphorothioate internucleotide linkage modification at position 1, and one phosphorothioate internucleotide linkage modification at position 21 of the sense strand (counting from the 5′-end), and two phosphorothioate internucleotide linkage modifications at positions 1 and 2 and two phosphorothioate internucleotide linkage modifications at positions 23 and 23 the antisense strand (counting from the 5′-end).

[0170] In some embodiments, the dsRNA agent comprises mismatch(es) with the target, within the duplex, or combinations thereof. The mismatch can occur in an overhang region or the duplex region. The base pair can be ranked on the basis of their propensity to promote dissociation or melting (e.g., on the free energy of association or dissociation of a particular pairing, the simplest approach is to examine the pairs on an individual pair basis, though next neighbor or similar analysis can also be used). In some cases, in terms of promoting dissociation: A:U is preferred over G:C; G:U is preferred over G:C; and I:C is preferred over G:C (I=inosine). In some cases, mismatches, e.g., non-canonical or other than canonical pairings (as described elsewhere herein) are preferred over canonical (A:T, A:U, G:C) pairings; and pairings which include a universal base are preferred over canonical pairings. In some embodiments, the dsRNA agent comprises at least one of the first 1, 2, 3, 4, or 5 base pairs within the duplex regions from the 5′-end of the antisense strand can be chosen independently from the group of: A:U, G:U, I:C, and mismatched pairs, e.g., non-canonical or other than canonical pairings or pairings which include a universal base, to promote the dissociation of the antisense strand at the 5′-end of the duplex.

[0171] In some embodiments, the nucleotide at the 1 position within the duplex region from the 5′-end in the antisense strand is selected from the group consisting of A, dA, dU, U, and dT. In some embodiments, at least one of the first 1, 2 or 3 base pair within the duplex region from the 5′-end of the antisense strand is an AU base pair. For example, the first base pair within the duplex region from the 5′-end of the antisense strand is an AU base pair.

[0172] In some embodiments, the dsRNA agent is conjugated to one or more carbohydrate moieties, which may optimize one or more properties of the dsRNA agent. In some cases, the carbohydrate moiety is attached to a modified subunit of the dsRNA agent. For example, the ribose sugar of one or more ribonucleotide subunits of a dsRNA agent can be replaced with another moiety, e.g., a non-carbohydrate (e.g., cyclic) carrier to which is attached a carbohydrate ligand. A ribonucleotide subunit in which the ribose sugar of the subunit is so replaced is referred to herein as a ribose replacement modification subunit (RRMS). A cyclic carrier may be a carbocyclic ring system, i.e., all ring atoms are carbon atoms, or a heterocyclic ring system, i.e., one or more ring atoms may be a heteroatom, e.g., nitrogen, oxygen, sulfur. The cyclic carrier may be a monocyclic ring system, or may contain two or more rings, e.g. fused rings. The cyclic carrier may be a fully saturated ring system, or it may contain one or more double bonds.

[0173] In some embodiments, a ligand is attached to the dsRNA via a carrier. In some cases, the carriers include (i) at least one “backbone attachment point” or two “backbone attachment points” and (ii) at least one “tethering attachment point.” In some cases, a “backbone attachment point” refers to a functional group, e.g. a hydroxy 1 group, or generally, a bond available for, and that is suitable for incorporation of the carrier into the backbone, e.g., the phosphate, or modified phosphate, e.g., sulfur containing, backbone, of a ribonucleic acid. A “tethering attachment point” (TAP), in some embodiments, refers to a constituent ring atom of the cyclic carrier, e.g., a carbon atom or a heteroatom (distinct from an atom which provides a backbone attachment point), that connects a selected moiety. The moiety can be, e.g., a carbohydrate, e.g. monosaccharide, disaccharide, trisaccharide, tetrasaccharide, oligosaccharide and polysaccharide. Optionally, the selected moiety is connected by an intervening tether to the cyclic carrier. Thus, the cyclic carrier may include a functional group, e.g., an amino group, or generally, provide a bond, that is suitable for incorporation or tethering of another chemical entity, e.g., a ligand to the constituent ring.

[0174] In some embodiments the dsRNA agent is conjugated to a ligand via a carrier, wherein the carrier can be cyclic group or acyclic group; e.g., the cyclic group is selected from pyrrolidinyl, pyrazolinyl, pyrazolidinyl, imidazolinyl, imidazolidinyl, piperidinyl, piperazinyl, [1,3]dioxolane, oxazolidinyl, isoxazolidinyl, morpholinyl, thiazolidinyl, isothiazolidinyl, quinoxalinyl, pyridazinonyl, tetrahydrofuryl and decalin; e.g., the acyclic group is selected from serinol backbone or diethanolamine backbone. The dsRNA agent may optionally be conjugated to one or more ligands. The ligand can be attached to the sense strand, antisense strand or both strands, at the 3′-end, 5′-end or both ends. For instance, the ligand may be conjugated to the sense strand, in particular, the 3′-end of the sense strand.

[0175] In some embodiments, the dsRNA is modified to promote stability. Stabilization of synthetic siRNA, such as a dsRNA herein, against rapid nuclease degradation may be regarded as a prerequisite for in vivo and therapeutic applications. This can be achieved using a variety of stabilization chemistries previously developed for other nucleic acid drugs, such as ribozymes and antisense molecules. These include chemical modifications to the native 2′-OH group in the ribose sugar backbone, such as 2′-O-methyl (2′OMe) and 2′-Fluoro (2′F) substitutions that can be readily introduced into siRNA as 2′-modified nucleotides during RNA synthesis. In some cases, the introduction of chemical modifications to native siRNA duplexes can have a negative impact on RNAi activity, therefore the design of chemically modified siRNA may require a stochastic screening approach to identify duplexes that retain potent gene silencing activity.

[0176] In some cases, when cleavage of the sense strand is inhibited, the endonucleolytic cleavage of target mRNA is impaired. In some cases, incorporation of a 2′-O-Me ribose to the Ago2 cleavage site in the sense strand inhibits RNAi. In some cases, with regard to phosphorothioate modifications, cleavage of the sense strand may be required for efficient RNAi.

[0177] In some cases, the dsRNA agent comprises 2′-F modified residues, e.g., at the Ago2 cleavage site. The modification may or may not be motif specific, e.g., one modification includes 2′-F modifications on all pyrimidines on both sense and antisense strands as long as pyrimidine residue is present, without any selectivity.

[0178] In some cases, the dsRNA agent comprises two 2′-F modified residues, e.g., at the Ago2 cleavage site, on the sense and/or antisense strand. In some cases, for each particular strand, either all pyrimidines or all purines are modified.

[0179] In some cases, the dsRNA agent comprises 2′-OMe modifications or various combinations of 2′-F, 2′-OMe and phosphorothioate modifications to stabilize the siRNA. In some cases, the residues at the cleavage site of the antisense strand are not be modified with 2′-OMe in order to increase the stability of the siRNA.

[0180] siRNAs

[0181] In some embodiments, the composition comprises an oligonucleotide that targets ANGPTL7, wherein the oligonucleotide comprises a small interfering RNA (siRNA). In some embodiments, the composition comprises an oligonucleotide that targets ANGPTL7, wherein the oligonucleotide comprises an siRNA comprising a sense strand and an antisense strand. In some embodiments, the siRNA comprises a double stranded agent described herein.

[0182] In some embodiments, the composition comprises an oligonucleotide that inhibits the expression of ANGPTL7, wherein the oligonucleotide comprises a siRNA comprising a sense strand and an antisense strand, wherein the sense strand is 14-30 nucleosides in length. In some embodiments, the composition comprises a sense strange that is at least about 10, 11, 12, 13, 14, 15, 16, 17, 18, 19, 20, 21, 22, 23, 24, 25, 26, 27, 28, 29, or 30 nucleosides in length, or a range defined by any of the two aforementioned numbers. In some embodiments, the composition comprises an antisense strand is 14-30 nucleosides in length. In some embodiments, the composition comprises an antisense strange that is at least about 10, 11, 12, 13, 14, 15, 16, 17, 18, 19, 20, 21, 22, 23, 24, 25, 26, 27, 28, 29, or 30 nucleosides in length, or a range defined by any of the two aforementioned numbers.

[0183] In some embodiments, the composition comprises an oligonucleotide that inhibits the expression of ANGPTL7, wherein the oligonucleotide comprises a siRNA comprising a sense strand and an antisense strand, each strand is independently about 14-30 nucleosides in length, and at least one of the sense strand and the antisense strand comprises a nucleoside sequence comprising about 14-30 contiguous nucleosides of a full-length human ANGPTL7 mRNA sequence such as SEQ ID NO: 11085. In some embodiments, at least one of the sense strand and the antisense strand comprise a nucleoside sequence comprising at least about 10, 11, 12, 13, 14, 15, 16, 17, 18, 19, 20, 21, 22, 23, 24, 25, 26, 27, 28, 29, 30, or more contiguous nucleosides of one of SEQ ID NO: 11085.

[0184] In some embodiments, the composition comprises an oligonucleotide that inhibits the expression of ANGPTL7, wherein the oligonucleotide comprises a siRNA comprising a sense strand and an antisense strand, each strand is independently about 14-30 nucleosides in length, and at least one of the sense strand and the antisense strand comprises a nucleoside sequence comprising about 14-30 contiguous nucleosides of a full-length human ANGPTL7 mRNA sequence such as SEQ ID NO: 11086. In some embodiments, at least one of the sense strand and the antisense strand comprise a nucleoside sequence comprising at least about 10, 11, 12, 13, 14, 15, 16, 17, 18, 19, 20, 21, 22, 23, 24, 25, 26, 27, 28, 29, 30, or more contiguous nucleosides of one of SEQ ID NO: 11086.

[0185] In some embodiments, the composition comprises an oligonucleotide that inhibits the expression of ANGPTL7, wherein the oligonucleotide comprises a siRNA comprising a sense strand and an antisense strand, wherein the sense strand and the antisense strand form a double-stranded RNA duplex. In some embodiments, the first base pair of the double-stranded RNA duplex is an AU base pair.

[0186] In some embodiments, the sense strand further comprises a 3′ overhang. In some embodiments, the 3′ overhang comprises 1, 2, 3, 4, 5, 6, 7, 8, 9, or 10 nucleosides, or a range of nucleotides defined by any two of the aforementioned numbers. In some embodiments, the 3′ overhang comprises 1, 2, or more nucleosides. In some embodiments, the 3′ overhang comprises 2 nucleosides. In some embodiments, the sense strand further comprises a 5′ overhang. In some embodiments, the 5′ overhang comprises 1, 2, 3, 4, 5, 6, 7, 8, 9, or 10 nucleosides, or a range of nucleotides defined by any two of the aforementioned numbers. In some embodiments, the 5′ overhang comprises 1, 2, or more nucleosides. In some embodiments, the 5′ overhang comprises 2 nucleosides.

[0187] In some embodiments, the antisense strand further comprises a 3′ overhang. In some embodiments, the 3′ overhang comprises 1, 2, 3, 4, 5, 6, 7, 8, 9, or 10 nucleosides, or a range of nucleotides defined by any two of the aforementioned numbers. In some embodiments, the 3′ overhang comprises 1, 2, or more nucleosides. In some embodiments, the 3′ overhang comprises 2 nucleosides. In some embodiments, the antisense strand further comprises a 5′ overhang. In some embodiments, the 5′ overhang comprises 1, 2, 3, 4, 5, 6, 7, 8, 9, or 10 nucleosides, or a range of nucleotides defined by any two of the aforementioned numbers. In some embodiments, the 5′ overhang comprises 1, 2, or more nucleosides. In some embodiments, the 5′ overhang comprises 2 nucleosides.

[0188] In some embodiments, the composition comprises an oligonucleotide that inhibits the expression of ANGPTL7, wherein the oligonucleotide comprises a siRNA comprising a sense strand and an antisense strand, wherein the siRNA binds with a 19mer in a human ANGPTL7 mRNA. In some embodiments, the siRNA binds with a 12mer, a 13mer, a 14mer, a 15mer, a 16mer, a 17mer, a 18mer, a 19mer, a 20mer, a 21mer, a 22mer, a 23mer, a 24mer, or a 25mer in a human ANGPTL7 mRNA.

[0189] In some embodiments, the composition comprises an oligonucleotide that inhibits the expression of ANGPTL7, wherein the oligonucleotide comprises a siRNA comprising a sense strand and an antisense strand, wherein the siRNA binds with a 17mer in a non-human primate ANGPTL7 mRNA. In some embodiments, the siRNA binds with a 12mer, a 13mer, a 14mer, a 15mer, a 16mer, a 17mer, a 18mer, a 19mer, a 20mer, a 21mer, a 22mer, a 23mer, a 24mer, or a 25mer in a non-human primate ANGPTL7 mRNA.

[0190] In some embodiments, the composition comprises an oligonucleotide that inhibits the expression of ANGPTL7, wherein the oligonucleotide comprises a siRNA comprising a sense strand and an antisense strand, wherein the siRNA binds with a 19mer in a human ANGPTL7 mRNA, or a combination thereof. In some embodiments, the siRNA binds with a 12mer, a 13mer, a 14mer, a 15mer, a 16mer, a 17mer, and 18mer, a 19mer, a 20mer, a 21mer, a 22mer, a 23mer, a 24mer, or a 25mer in a human ANGPTL7 mRNA.

[0191] In some embodiments, the composition comprises an oligonucleotide that inhibits the expression of ANGPTL7, wherein the oligonucleotide comprises a siRNA comprising a sense strand and an antisense strand, wherein the siRNA binds with a human ANGPTL7 mRNA and less than or equal to 20 human off-targets, with no more than 2 mismatches in the antisense strand. In some embodiments, the siRNA binds with a human ANGPTL7 mRNA and less than or equal to 10 human off-targets, with no more than 2 mismatches in the antisense strand. In some embodiments, the siRNA binds with a human ANGPTL7 mRNA and less than or equal to 30 human off-targets, with no more than 2 mismatches in the antisense strand. In some embodiments, the siRNA binds with a human ANGPTL7 mRNA and less than or equal to 40 human off-targets, with no more than 2 mismatches in the antisense strand. In some embodiments, the siRNA binds with a human ANGPTL7 mRNA and less than or equal to 50 human off-targets, with no more than 2 mismatches in the antisense strand. In some embodiments, the siRNA binds with a human ANGPTL7 mRNA and less than or equal to 10 human off-targets, with no more than 3 mismatches in the antisense strand. In some embodiments, the siRNA binds with a human ANGPTL7 mRNA and less than or equal to 20 human off-targets, with no more than 3 mismatches in the antisense strand. In some embodiments, the siRNA binds with a human ANGPTL7 mRNA and less than or equal to 30 human off-targets, with no more than 3 mismatches in the antisense strand. In some embodiments, the siRNA binds with a human ANGPTL7 mRNA and less than or equal to 40 human off-targets, with no more than 3 mismatches in the antisense strand. In some embodiments, the siRNA binds with a human ANGPTL7 mRNA and less than or equal to 50 human off-targets, with no more than 3 mismatches in the antisense strand.

[0192] In some embodiments, the composition comprises an oligonucleotide that inhibits the expression of ANGPTL7, wherein the oligonucleotide comprises a siRNA comprising a sense strand and an antisense strand. In some embodiments, the siRNA binds with a human ANGPTL7 mRNA target site that does not harbor an SNP, with a minor allele frequency (MAF) greater or equal to 1% (pos. 2-18). In some embodiments, the MAF is greater or equal to about 2%, about 3%, about 4%, about 5%, about 6%, about 7%, about 8%, about 9%, about 10%, about 11%, about 12%, about 13%, about 14%, about 15%, about 16%, about 17%, about 18%, about 19%, or about 20%.

[0193] In some embodiments, the siRNA binds with a human ANGPTL7 mRNA with no more than 2 mismatches in the antisense strand. In some embodiments, the siRNA binds with a human ANGPTL7 mRNA target site that does not harbor an SNP, with a minor allele frequency (MAF) greater or equal to 1% (pos. 2-18). In some embodiments, the sense strand and the antisense strand each comprise a seed region that is not identical to a seed region of a human miRNA. In some embodiments, the sense strand comprises a seed region that is not identical to a seed region of a human miRNA. In some embodiments, the antisense strand comprises a seed region that is not identical to a seed region of a human miRNA.

[0194] In some embodiments, the composition comprises an oligonucleotide that inhibits the expression of ANGPTL7, wherein the oligonucleotide comprises a siRNA comprising a sense strand and an antisense strand. In some embodiments, the oligonucleotide comprises a nucleic acid sequence (e.g. a sense strand sequence or an antisense strand sequence). In some embodiments, the sense strand comprises a sense strand sequence. In some embodiments, the antisense strand comprises an antisense strand sequence. In some embodiments, the nucleic acid sequence comprises or consists of sequence at least 75% identical to of any one of SEQ ID NOs: 1-4412, at least 80% identical to of any one of SEQ ID NOs: 1-4412, at least 85% identical to of any one of SEQ ID NOs: 1-4412, at least 90% identical to of any one of SEQ ID NOs: 1-4412, or at least 95% identical to of any one of SEQ ID NOs: 1-4412. In some embodiments, the nucleic acid sequence comprises or consists of the sequence of any one of SEQ ID NOs: 1-4412, or a nucleic acid sequence thereof having 1, 2, 3, or 4 nucleoside substitutions, additions, or deletions. In some embodiments, the nucleic acid sequence comprises or consists of the sequence of any one of SEQ ID NOs: 1-4412, or a nucleic acid sequence thereof having 1 or 2 nucleoside substitutions, additions, or deletions. In some embodiments, the nucleic acid sequence comprises or consists of the sequence of any one of SEQ ID NOs: 1-4412. In some embodiments, the nucleic acid sequence comprises or consists of sequence at least 75% identical to of any one of SEQ ID NOs: 11450-11499, at least 80% identical to of any one of SEQ ID NOs: 11450-11499, at least 85% identical to of any one of SEQ ID NOs: 11450-11499, at least 90% identical to of any one of SEQ ID NOs: 11450-11499, or at least 95% identical to of any one of SEQ ID NOs: 11450-11499. In some embodiments, the nucleic acid sequence comprises or consists of the sequence of any one of SEQ ID NOs: 11450-11499, or a nucleic acid sequence thereof having 1, 2, 3, or 4 nucleoside substitutions, additions, or deletions. In some embodiments, the nucleic acid sequence comprises or consists of the sequence of any one of SEQ ID NOs: 11450-11499, or a nucleic acid sequence thereof having 1 or 2 nucleoside substitutions, additions, or deletions. In some embodiments, the nucleic acid sequence comprises or consists of the sequence of any one of SEQ ID NOs: 11450-11499. In some embodiments, the oligonucleotide comprises an overhang described herein. In some embodiments, the oligonucleotide comprises on or more modifications or modification patterns described herein.

[0195] In some embodiments, the oligonucleotide comprises or consists of any one of the siRNAs of siRNA subset A, or an siRNA thereof having 1 or 2 nucleoside substitutions, additions, or deletions. In some embodiments, the oligonucleotide comprises or consists of any one of the siRNAs of siRNA subset A. In some embodiments, the oligonucleotide comprises or consists of any one of the siRNAs of siRNA subset B, or an siRNA thereof having 1 or 2 nucleoside substitutions, additions, or deletions. In some embodiments, the oligonucleotide comprises or consists of any one of the siRNAs of siRNA subset B. In some embodiments, the oligonucleotide comprises or consists of any one of the siRNAs of siRNA subset C, or an siRNA thereof having 1 or 2 nucleoside substitutions, additions, or deletions. In some embodiments, the oligonucleotide comprises or consists of any one of the siRNAs of siRNA subset C. In some embodiments, the oligonucleotide comprises or consists of any one of the siRNAs of siRNA subset D, or an siRNA thereof having 1 or 2 nucleoside substitutions, additions, or deletions. In some embodiments, the oligonucleotide comprises or consists of any one of the siRNAs of siRNA subset D. In some embodiments, the oligonucleotide comprises or consists of any one of the siRNAs of siRNA subset E, or an siRNA thereof having 1 or 2 nucleoside substitutions, additions, or deletions. In some embodiments, the oligonucleotide comprises or consists of any one of the siRNAs of siRNA subset E.

[0196] In some embodiments, the sense strand sequence comprises or consists of sequence at least 75% identical to of any one of SEQ ID NOs: 1-2206, at least 80% identical to of any one of SEQ ID NOs: 1-2206, at least 85% identical to of any one of SEQ ID NOs: 1-2206, at least 90% identical to of any one of SEQ ID NOs: 1-2206, or at least 95% identical to of any one of SEQ ID NOs: 1-2206. In some embodiments, the sense strand sequence comprises or consists of the sequence of any one of SEQ ID NOs: 1-2206, or a sense strand sequence thereof having 1, 2, 3, or 4 nucleoside substitutions, additions, or deletions. In some embodiments, the sense strand sequence comprises or consists of the sequence of any one of SEQ ID NOs: 1-2206, or a sense strand sequence thereof having 1 or 2 nucleoside substitutions, additions, or deletions. In some embodiments, the sense strand sequence comprises or consists of the sequence of any one of SEQ ID NOs: 1-2206. In some embodiments, the sense strand comprises an overhang described herein. In some embodiments, the sense strand comprises one or more modifications or modification patterns described herein.

[0197] In some embodiments, the sense strand sequence comprises or consists of sequence at least 75% identical to of any one of SEQ ID NOs: 11450-11474, at least 80% identical to of any one of SEQ ID NOs: 11450-11474, at least 85% identical to of any one of SEQ ID NOs: 11450-11474, at least 90% identical to of any one of SEQ ID NOs: 11450-11474, or at least 95% identical to any one of SEQ ID NOs: 11450-11474. In some embodiments, the sense strand sequence comprises or consists of the sequence of any one of SEQ ID NOs: 11450-11474, or a sense strand sequence thereof having 1, 2, 3, or 4 nucleoside substitutions, additions, or deletions. In some embodiments, the sense strand sequence comprises or consists of the sequence of any one of SEQ ID NOs: 11450-11474, or a sense strand sequence thereof having 1 or 2 nucleoside substitutions, additions, or deletions. In some embodiments, the sense strand sequence comprises or consists of the sequence of any one of SEQ ID NOs: 11450-11474. In some embodiments, the sense strand comprises an overhang described herein. In some embodiments, the sense strand comprises one or more modifications or modification patterns described herein.

[0198] In some embodiments, the sense strand sequence comprises or consists of sequence at least 75% identical, at least 80% identical, at least 85% identical, at least 90% identical, or at least 95% identical to of any one of SEQ ID NOs: 7, 92, 93, 94, 115, 117, 118, 120, 206, 207, 256, 645, 646, 657, 740, 741, 743, 923, 943, 948, 1021, 1092, 1094, 1097, 1105, 1107, 1132, 1198, 1201, 1424, 1425, 1429, 1434, 1436, 1438, 1537, 1541, 1639, 1654, 1691, 1693, 1762, 1764, 1765, 1794, 1796, 1797, 1968, 1969, 2030, 2085, 2087, 2091, 2095, 2099, 2192, 11470, 11473, or 11474. In some embodiments, the sense strand sequence comprises or consists of the sequence of any one of SEQ ID NOs: 7, 92, 93, 94, 115, 117, 118, 120, 206, 207, 256, 645, 646, 657, 740, 741, 743, 923, 943, 948, 1021, 1092, 1094, 1097, 1105, 1107, 1132, 1198, 1201, 1424, 1425, 1429, 1434, 1436, 1438, 1537, 1541, 1639, 1654, 1691, 1693, 1762, 1764, 1765, 1794, 1796, 1797, 1968, 1969, 2030, 2085, 2087, 2091, 2095, 2099, 2192, 11470, 11473, or 11474, or a sense strand sequence thereof having 1, 2, 3, or 4 nucleoside substitutions, additions, or deletions. In some embodiments, the sense strand sequence comprises or consists of the sequence of any one of SEQ ID NOs: 7, 92, 93, 94, 115, 117, 118, 120, 206, 207, 256, 645, 646, 657, 740, 741, 743, 923, 943, 948, 1021, 1092, 1094, 1097, 1105, 1107, 1132, 1198, 1201, 1424, 1425, 1429, 1434, 1436, 1438, 1537, 1541, 1639, 1654, 1691, 1693, 1762, 1764, 1765, 1794, 1796, 1797, 1968, 1969, 2030, 2085, 2087, 2091, 2095, 2099, 2192, 11470, 11473, or 11474, or a sense strand sequence thereof having 1 or 2 nucleoside substitutions, additions, or deletions. In some embodiments, the sense strand sequence comprises or consists of the sequence of any one of SEQ ID NOs: 7, 92, 93, 94, 115, 117, 118, 120, 206, 207, 256, 645, 646, 657, 740, 741, 743, 923, 943, 948, 1021, 1092, 1094, 1097, 1105, 1107, 1132, 1198, 1201, 1424, 1425, 1429, 1434, 1436, 1438, 1537, 1541, 1639, 1654, 1691, 1693, 1762, 1764, 1765, 1794, 1796, 1797, 1968, 1969, 2030, 2085, 2087, 2091, 2095, 2099, 2192, 11470, 11473, or 11474. In some embodiments, the sense strand comprises an overhang described herein.

[0199] In some embodiments, the sense strand comprises or consists of a sense strand of any one of the siRNAs of siRNA subset A, or a sense strand thereof having 1 or 2 nucleoside substitutions, additions, or deletions. In some embodiments, the sense strand comprises or consists of a sense strand of any one of the siRNAs of siRNA subset A. In some embodiments, the sense strand comprises or consists of a sense strand of any one of the siRNAs of siRNA subset B, or a sense strand thereof having 1 or 2 nucleoside substitutions, additions, or deletions. In some embodiments, the sense strand comprises or consists of a sense strand of any one of the siRNAs of siRNA subset B. In some embodiments, the sense strand comprises or consists of a sense strand of any one of the siRNAs of siRNA subset C, or a sense strand thereof having 1 or 2 nucleoside substitutions, additions, or deletions. In some embodiments, the sense strand comprises or consists of a sense strand of any one of the siRNAs of siRNA subset C. In some embodiments, the sense strand comprises or consists of a sense strand of any one of the siRNAs of siRNA subset D, or a sense strand thereof having 1 or 2 nucleoside substitutions, additions, or deletions. In some embodiments, the sense strand comprises or consists of a sense strand of any one of the siRNAs of siRNA subset D. In some embodiments, the sense strand comprises or consists of a sense strand of any one of the siRNAs of siRNA subset E, or a sense strand thereof having 1 or 2 nucleoside substitutions, additions, or deletions. In some embodiments, the sense strand comprises or consists of a sense strand of any one of the siRNAs of siRNA subset E.

[0200] In some embodiments, the sense strand sequence comprises or consists of the sequence of SEQ ID NO: 11089, or a sense strand sequence thereof having 1 or 2 nucleoside substitutions, additions, or deletions. In some embodiments, the sense strand sequence comprises or consists of the sequence of SEQ ID NO: 11089.

[0201] In some embodiments, the antisense strand sequence comprises or consists of sequence at least 75% identical to any one of SEQ ID NOs: 2207-4412, at least 80% identical to any one of SEQ ID NOs: 2207-4412, at least 85% identical to of any one of SEQ ID NOs: 2207-4412, at least 90% identical to any one of SEQ ID NOs: 2207-4412, or at least 95% identical to any one of SEQ ID NOs: 2207-4412. In some embodiments, the antisense strand sequence comprises or consists of the sequence of any one of SEQ ID NOs: 2207-4412, or an antisense strand sequence thereof having 1, 2, 3, or 4 nucleoside substitutions, additions, or deletions. In some embodiments, the antisense strand sequence comprises or consists of the sequence of any one of SEQ ID NOs: 2207-4412, or an antisense strand sequence thereof having 1 or 2 nucleoside substitutions, additions, or deletions. In some embodiments, the antisense strand sequence comprises or consists of the sequence of any one of SEQ ID NOs: 2207-4412. In some embodiments, the antisense strand comprises an overhang described herein. In some embodiments, the antisense strand comprises one or more modifications or modification patterns described herein.

[0202] In some embodiments, the antisense strand sequence comprises or consists of sequence at least 75% identical to any one of SEQ ID NOs: 11475-11499, at least 80% identical to any one of SEQ ID NOs: 11475-11499, at least 85% identical to any one of SEQ ID NOs: 11475-11499, at least 90% identical to any one of SEQ ID NOs: 11475-11499, or at least 95% identical to any one of SEQ ID NOs: 11475-11499. In some embodiments, the antisense strand sequence comprises or consists of the sequence of any one of SEQ ID NOs: 11475-11499, or an antisense strand sequence thereof having 1, 2, 3, or 4 nucleoside substitutions, additions, or deletions. In some embodiments, the antisense strand sequence comprises or consists of the sequence of any one of SEQ ID NOs: 11475-11499, or an antisense strand sequence thereof having 1 or 2 nucleoside substitutions, additions, or deletions. In some embodiments, the antisense strand sequence comprises or consists of the sequence of any one of SEQ ID NOs: 11475-11499. In some embodiments, the antisense strand comprises an overhang described herein. In some embodiments, the antisense strand comprises one or more modifications or modification patterns described herein.

[0203] In some embodiments, the antisense strand sequence comprises or consists of sequence at least 75% identical, at least 80% identical, at least 85% identical, at least 90% identical, or at least 95% identical to any one of SEQ ID NOs: 2213, 2298, 2299, 2300, 2321, 2323, 2324, 2326, 2412, 2413, 2462, 2851, 2852, 2863, 2946, 2947, 2949, 3129, 3149, 3154, 3227, 3298, 3300, 3303, 3311, 3313, 3338, 3404, 3407, 3630, 3631, 3635, 3640, 3642, 3644, 3743, 3747, 3845, 3860, 3897, 3899, 3968, 3970, 3971, 4000, 4002, 4003, 4174, 4175, 4236, 4291, 4293, 4297, 4301, 4305, 4398, 11495, 11498, or 11499. In some embodiments, the antisense strand sequence comprises or consists of the sequence of any one of SEQ ID NOs: 2213, 2298, 2299, 2300, 2321, 2323, 2324, 2326, 2412, 2413, 2462, 2851, 2852, 2863, 2946, 2947, 2949, 3129, 3149, 3154, 3227, 3298, 3300, 3303, 3311, 3313, 3338, 3404, 3407, 3630, 3631, 3635, 3640, 3642, 3644, 3743, 3747, 3845, 3860, 3897, 3899, 3968, 3970, 3971, 4000, 4002, 4003, 4174, 4175, 4236, 4291, 4293, 4297, 4301, 4305, 4398, 11495, 11498, or 11499, or an antisense strand sequence thereof having 1, 2, 3, or 4 nucleoside substitutions, additions, or deletions. In some embodiments, the antisense strand sequence comprises or consists of the sequence of any one of SEQ ID NOs: 2213, 2298, 2299, 2300, 2321, 2323, 2324, 2326, 2412, 2413, 2462, 2851, 2852, 2863, 2946, 2947, 2949, 3129, 3149, 3154, 3227, 3298, 3300, 3303, 3311, 3313, 3338, 3404, 3407, 3630, 3631, 3635, 3640, 3642, 3644, 3743, 3747, 3845, 3860, 3897, 3899, 3968, 3970, 3971, 4000, 4002, 4003, 4174, 4175, 4236, 4291, 4293, 4297, 4301, 4305, 4398, 11495, 11498, or 11499, or an antisense strand sequence thereof having 1 or 2 nucleoside substitutions, additions, or deletions. In some embodiments, the antisense strand sequence comprises or consists of the sequence of any one of SEQ ID NOs: 2213, 2298, 2299, 2300, 2321, 2323, 2324, 2326, 2412, 2413, 2462, 2851, 2852, 2863, 2946, 2947, 2949, 3129, 3149, 3154, 3227, 3298, 3300, 3303, 3311, 3313, 3338, 3404, 3407, 3630, 3631, 3635, 3640, 3642, 3644, 3743, 3747, 3845, 3860, 3897, 3899, 3968, 3970, 3971, 4000, 4002, 4003, 4174, 4175, 4236, 4291, 4293, 4297, 4301, 4305, 4398, 11495, 11498, or 11499. In some embodiments, the antisense strand comprises an overhang described herein. In some embodiments, the antisense strand comprises one or more modifications or modification patterns described herein.

[0204] In some embodiments, the antisense strand comprises or consists of an antisense strand of any one of the siRNAs of siRNA subset A, or an antisense strand thereof having 1 or 2 nucleoside substitutions, additions, or deletions. In some embodiments, the antisense strand comprises or consists of an antisense strand of any one of the siRNAs of siRNA subset A. In some embodiments, the antisense strand comprises or consists of an antisense strand of any one of the siRNAs of siRNA subset B, or an antisense strand thereof having 1 or 2 nucleoside substitutions, additions, or deletions. In some embodiments, the antisense strand comprises or consists of an antisense strand of any one of the siRNAs of siRNA subset B. In some embodiments, the antisense strand comprises or consists of an antisense strand of any one of the siRNAs of siRNA subset C, or an antisense strand thereof having 1 or 2 nucleoside substitutions, additions, or deletions. In some embodiments, the antisense strand comprises or consists of an antisense strand of any one of the siRNAs of siRNA subset C. In some embodiments, the antisense strand comprises or consists of an antisense strand of any one of the siRNAs of siRNA subset D, or an antisense strand thereof having 1 or 2 nucleoside substitutions, additions, or deletions. In some embodiments, the antisense strand comprises or consists of an antisense strand of any one of the siRNAs of siRNA subset D. In some embodiments, the antisense strand comprises or consists of an antisense strand of any one of the siRNAs of siRNA subset E, or an antisense strand thereof having 1 or 2 nucleoside substitutions, additions, or deletions. In some embodiments, the antisense strand comprises or consists of an antisense strand of any one of the siRNAs of siRNA subset E.

[0205] In some embodiments, the antisense strand sequence comprises or consists of the sequence of SEQ ID NO: 11090, or an antisense strand sequence thereof having 1 or 2 nucleoside substitutions, additions, or deletions. In some embodiments, the antisense strand sequence comprises or consists of the sequence of SEQ ID NO: 11090.

[0206] In some embodiments, the siRNA comprises a sense strand having a sequence in accordance with any of SEQ ID NOs: 11529-11533. In some embodiments, the sense strand sequence comprises or consists of sequence at least 75% identical to any one of SEQ ID NOs: 11529-11533, at least 80% identical to any one of SEQ ID NOs: 11529-11533, at least 85% identical to of any one of SEQ ID NOs: 11529-11533, at least 90% identical to any one of SEQ ID NOs: 11529-11533, or at least 95% identical to any one of SEQ ID NOs: 11529-11533. In some embodiments, the sense strand sequence comprises or consists of the sequence of any one of SEQ ID NOs: 11529-11533, or a sense strand sequence thereof having 1, 2, 3, or 4 nucleoside substitutions, additions, or deletions. The sense strand may comprise a modification pattern described herein. The sense strand may comprise a lipid moiety such as a cholesterol moiety described herein.

[0207] In some embodiments, the siRNA comprises an antisense strand having a sequence in accordance with any of SEQ ID NOs: 11534-11538. In some embodiments, the antisense strand sequence comprises or consists of sequence at least 75% identical to any one of SEQ ID NOs: 11534-11538, at least 80% identical to any one of SEQ ID NOs: 11534-11538, at least 85% identical to of any one of SEQ ID NOs: 11534-11538, at least 90% identical to any one of SEQ ID NOs: 11534-11538, or at least 95% identical to any one of SEQ ID NOs: 11534-11538. In some embodiments, the antisense strand sequence comprises or consists of the sequence of any one of SEQ ID NOs: 11534-11538, or an antisense strand sequence thereof having 1, 2, 3, or 4 nucleoside substitutions, additions, or deletions. The antisense strand may comprise a modification pattern described herein.

[0208] In some embodiments, the siRNA a sense strand comprising the sequence of SEQ ID NO: 11474, or a nucleic acid sequence thereof having 3 or 4 nucleoside substitutions, additions, or deletions. In some embodiments, the siRNA a sense strand comprising the sequence of SEQ ID NO: 11474, or a nucleic acid sequence thereof having 1 or 2 nucleoside substitutions, additions, or deletions. In some embodiments, the siRNA a sense strand comprising the sequence of SEQ ID NO: 11474. In some embodiments, the sense strand comprises one or more internucleoside linkage or nucleoside modifications. In some embodiments, the siRNA an antisense strand comprising the sequence of SEQ ID NO: 11499, or a nucleic acid sequence thereof having 3 or 4 nucleoside substitutions, additions, or deletions. In some embodiments, the siRNA an antisense strand comprising the sequence of SEQ ID NO: 11499, or a nucleic acid sequence thereof having 1 or 2 nucleoside substitutions, additions, or deletions. In some embodiments, the siRNA an antisense strand comprising the sequence of SEQ ID NO: 11499. In some embodiments, the antisense strand comprises one or more internucleoside linkage or nucleoside modifications.

[0209] siRNA Modification Patterns

[0210] The oligonucleotides described herein (e.g. siRNAs, sense strands, antisense strands, siRNA agents, or dsRNA agents) may include any modification pattern disclosed herein, including but not limited to any one or more of modification patterns 1S, 2S, 3S, 4S, 5S, 6S, 7S, 8S, 9S, 10S, 11S, 12S, 13S, 14S, 15S, 16S, 1AS, 2AS, 3AS, 4AS, 6AS, 7AS, 8AS, 9AS, or 10AS.

[0211] In some embodiments, the composition comprises an oligonucleotide that inhibits the expression of ANGPTL7 wherein the oligonucleotide comprises a siRNA comprising a sense strand and an antisense strand, wherein the sense strand comprises modification pattern 1S: 5′-NfsnsNfnNfnNfNfNfnNfnNfnNfnNfnNfsnsn-3′ (SEQ ID NO: 11381), wherein “Nf” is a 2′-fluoro-modified nucleoside, “n” is a 2′-O-methyl modified nucleoside, and “s” is a phosphorothioate linkage. In some embodiments, the sense strand comprises modification pattern 2S: 5′-nsnsnnNfnNfNfNfnnnnnnnnnnsnsn-3′ (SEQ ID NO: 11382), wherein “Nf” is a 2′-fluoro-modified nucleoside, “n” is a 2′-O-methyl modified nucleoside, and “s” is a phosphorothioate linkage. In some embodiments, the sense strand comprises modification pattern 3S: 5′-nsnsnnNfnNfnNfnnnnnnnnnnsnsn-3′ (SEQ ID NO: 11383), wherein “Nf” is a 2′-fluoro-modified nucleoside, “n” is a 2′-O-methyl modified nucleoside, and “s” is a phosphorothioate linkage. In some embodiments, the sense strand comprises modification pattern 4S: 5′-NfsnsNfnNfnNfNfNfnNfnNfnNfnNfnNfsnsnN-Lipid-3′ (SEQ ID NO: 11384), wherein “Nf” is a 2′-fluoro-modified nucleoside, “n” is a 2′-O-methyl modified nucleoside, “s” is a phosphorothioate linkage, and N comprises a nucleoside. In some embodiments, the sense strand comprises modification pattern 5S: 5′-nsnsnnNfnNfNfNfnnnnnnnnnnsnsnN-Lipid-3′ (SEQ ID NO: 11385), wherein “Nf” is a 2′-fluoro-modified nucleoside, “n” is a 2′-O-methyl modified nucleoside, “s” is a phosphorothioate linkage, and N comprises a nucleoside. In some embodiments, the sense strand comprises modification pattern 6S: 5′-NfsnsNfnNfnNfnNfnNfnNfnNfnNfnNfsnsn-3′ (SEQ ID NO: 11394), wherein “Nf” is a 2′-fluoro-modified nucleoside, “n” is a 2′-O-methyl modified nucleoside, and “s” is a phosphorothioate linkage. In some embodiments, the sense strand comprises modification pattern 7S: 5′-NfsnsNfnNfnNfnNfnNfnNfnNfnNfnNfsnsn-Lipid-3′ (SEQ ID NO: 11395), wherein “Nf” is a 2′-fluoro-modified nucleoside, “n” is a 2′-O-methyl modified nucleoside, and “s” is a phosphorothioate linkage. In some embodiments, the sense strand comprises modification pattern 8S: 5′-nsnsnnNfnNfnNfnnnnnnnnnnsnsn-Lipid-3′ (SEQ ID NO: 11396), wherein “Nf” is a 2′-fluoro-modified nucleoside, “n” is a 2′-O-methyl modified nucleoside, and “s” is a phosphorothioate linkage. In some embodiments, the sense strand comprises modification pattern 9S: 5′-Lipid-NfsnsNfnNfnNfnNfnNfnNfnNfnNfnNfsnsn-3′ (SEQ ID NO: 11397), wherein “Nf” is a 2′-fluoro-modified nucleoside, “n” is a 2′-O-methyl modified nucleoside, and “s” is a phosphorothioate linkage. In some embodiments, the sense strand comprises modification pattern 10S: 5′-Lipid-nsnsnnNfnNfnNfnnnnnnnnnnsnsn-3′ (SEQ ID NO: 11398), wherein “Nf” is a 2′-fluoro-modified nucleoside, “n” is a 2′-O-methyl modified nucleoside, and “s” is a phosphorothioate linkage. In some embodiments, the sense strand comprises modification pattern 11S: 5′-NfsnsNfnNfnNfnNfnNfnNfnNfnNfnNfsnsnN-Lipid-3′ (SEQ ID NO: 11508), wherein “Nf” is a 2′-fluoro-modified nucleoside, “n” is a 2′-O-methyl modified nucleoside, “s” is a phosphorothioate linkage, and “N” is a nucleoside. In some embodiments, the sense strand comprises modification pattern 12S: 5′-nsnsnnNfnNfnNfnnnnnnnnnnsnsnN-Lipid-3′ (SEQ ID NO: 11509), wherein “Nf” is a 2′-fluoro-modified nucleoside, “n” is a 2′-O-methyl modified nucleoside, “s” is a phosphorothioate linkage, and “N” is a nucleoside. In some embodiments, the sense strand comprises modification pattern 13S: 5′-Lipid-NfsnsNfnNfnNfnNfnNfnNfnNfnNfnNfsnsnN-3′ (SEQ ID NO: 11510), wherein “Nf” is a 2′-fluoro-modified nucleoside, “n” is a 2′-O-methyl modified nucleoside, “s” is a phosphorothioate linkage, and “N” is a nucleoside. In some embodiments, the sense strand comprises modification pattern 14S: 5′-Lipid-nsnsnnNfnNfnNfnnnnnnnnnnsnsnN-3′ (SEQ ID NO: 11511), wherein “Nf” is a 2′-fluoro-modified nucleoside, “n” is a 2′-O-methyl modified nucleoside, “s” is a phosphorothioate linkage, and “N” is a nucleoside. In some embodiments, the sense strand comprises modification pattern 15S: 5′-nsNfsnNfnNfnNfNfnnnnnNfnNfNfnsnsn-3′ (SEQ ID NO: 11541), wherein “Nf” is a 2′-fluoro-modified nucleoside, “n” is a 2′-O-methyl modified nucleoside, “s” is a phosphorothioate linkage, and “N” is a nucleoside. In some embodiments, the sense strand comprises modification pattern 16S: 5′-NfsnsNfnNfnNfnnNfNfNfNfNfnNfnnNfsnsn-3′ (SEQ ID NO: 11542), wherein “Nf” is a 2′-fluoro-modified nucleoside, “n” is a 2′-O-methyl modified nucleoside, “s” is a phosphorothioate linkage, and “N” is a nucleoside.

[0212] In some embodiments, the composition comprises an oligonucleotide that inhibits the expression of ANGPTL7 wherein the oligonucleotide comprises a siRNA comprising a sense strand and an antisense strand, wherein the antisense strand comprises modification pattern 1AS: 5′-nsNfsnNfnNfnNfnNfnnnNfnNfnNfnsnsn-3′ (SEQ ID NO: 11386), wherein “Nf” is a 2′-fluoro-modified nucleoside, “n” is a 2′-O-methyl modified nucleoside, and “s” is a phosphorothioate linkage. In some embodiments, the antisense strand comprises modification pattern 2AS: 5′-nsNfsnnnNfnNfNfnnnnNfnNfnnnsnsn-3′ (SEQ ID NO: 11387), wherein “Nf” is a 2′-fluoro-modified nucleoside, “n” is a 2′-O-methyl modified nucleoside, and “s” is a phosphorothioate linkage. In some embodiments, the antisense strand comprises modification pattern 3AS: 5′-nsNfsnnnNfnnnnnnnNfnNfnnnsnsn-3′ (SEQ ID NO: 11388), wherein “Nf” is a 2′-fluoro-modified nucleoside, “n” is a 2′-O-methyl modified nucleoside, and “s” is a phosphorothioate linkage. In some embodiments, the antisense strand comprises modification pattern 4AS: 5′-nsNfsnNfnNfnnnnnnnNfnNfnnnsnsn 3′ (SEQ ID NO: 11389), wherein “Nf” is a 2′-fluoro-modified nucleoside, “n” is a 2′-O-methyl modified nucleoside, and “s” is a phosphorothioate linkage. In some embodiments, the antisense strand comprises modification pattern 6AS: 5′-nsNfsnNfnNfnNfnNfnNfnNfnNfnNfnsnsn-3′ (SEQ ID NO: 11399), wherein “Nf” is a 2′-fluoro-modified nucleoside, “n” is a 2′-O-methyl modified nucleoside, and “s” is a phosphorothioate linkage. In some embodiments, the antisense strand comprises modification pattern 7AS: 5′-nsNfsnNfnNfnNfNfnnnnNfnNfnnnsnsn-3′ (SEQ ID NO: 11400), wherein “Nf” is a 2′-fluoro-modified nucleoside, “n” is a 2′-O-methyl modified nucleoside, and “s” is a phosphorothioate linkage. In some embodiments, the antisense strand comprises modification pattern 8AS: 5′-nsNfsnnnnnnnnnnnNfnnnnnsnsn-3′ (SEQ ID NO: 11401), wherein “Nf” is a 2′-fluoro-modified nucleoside, “n” is a 2′-O-methyl modified nucleoside, and “s” is a phosphorothioate linkage. In some embodiments, the antisense strand comprises modification pattern 9AS: 5′-nsNfsnnnnnnnnnNfnNfnNfnNfnsnsn-3′ (SEQ ID NO:11543), wherein “Nf” is a 2′-fluoro-modified nucleoside, “n” is a 2′-O-methyl modified nucleoside, and “s” is a phosphorothioate linkage. In some embodiments, the antisense strand comprises modification pattern 10AS: 5′-nsNfsNfnNfnnnnnnNfnNfnNfnNfnsnsn-3′ (SEQ ID NO:11544), wherein “Nf” is a 2′-fluoro-modified nucleoside, “n” is a 2′-O-methyl modified nucleoside, and “s” is a phosphorothioate linkage.

[0213] In some embodiments, the composition comprises an oligonucleotide that inhibits the expression of ANGPTL7 wherein the oligonucleotide comprises a siRNA comprising a sense strand and an antisense strand, wherein the sense strand comprises pattern 1S and the antisense strand comprises pattern 1AS, 2AS, 3AS, 4AS, 6AS, 7AS, 8AS, 9AS, or 10AS. In some embodiments, the sense strand comprises pattern 2S and the antisense strand comprises pattern 1AS, 2AS, 3AS, 4AS, 6AS, 7AS, 8AS, 9AS, or 10AS. In some embodiments, the sense strand comprises pattern 3S and the antisense strand comprises pattern 1AS, 2AS, 3AS, 4AS, 6AS, 7AS, 8AS, 9AS, or 10AS. In some embodiments, the sense strand comprises pattern 4S and the antisense strand comprises pattern 1AS, 2AS, 3AS, 4AS, 6AS, 7AS, 8AS, 9AS, or 10AS. In some embodiments, the sense strand comprises pattern 5S and the antisense strand comprises pattern 1AS, 2AS, 3AS, 4AS, 6AS, 7AS, 8AS, 9AS, or 10AS. In some embodiments, the sense strand comprises pattern 6S and the antisense strand comprises pattern 1AS, 2AS, 3AS, 4AS, 6AS, 7AS, 8AS, 9AS, or 10AS. In some embodiments, the sense strand comprises pattern 7S and the antisense strand comprises pattern 1AS, 2AS, 3AS, 4AS, 6AS, 7AS, 8AS, 9AS, or 10AS. In some embodiments, the sense strand comprises pattern 8S and the antisense strand comprises pattern 1AS, 2AS, 3AS, 4AS, 6AS, 7AS, 8AS, 9AS, or 10AS. In some embodiments, the sense strand comprises pattern 9S and the antisense strand comprises pattern 1AS, 2AS, 3AS, 4AS, 6AS, 7AS, 8AS, 9AS, or 10AS. In some embodiments, the sense strand comprises pattern 10S and the antisense strand comprises pattern 1AS, 2AS, 3AS, 4AS, 6AS, 7AS, 8AS, 9AS, or 10AS. In some embodiments, the sense strand comprises pattern 11S and the antisense strand comprises pattern 1AS, 2AS, 3AS, 4AS, 6AS, 7AS, 8AS, 9AS, or 10AS. In some embodiments, the sense strand comprises pattern 12S and the antisense strand comprises pattern 1AS, 2AS, 3AS, 4AS, 6AS, 7AS, 8AS, 9AS, or 10AS. In some embodiments, the sense strand comprises pattern 13S and the antisense strand comprises pattern 1AS, 2AS, 3AS, 4AS, 6AS, 7AS, 8AS, 9AS, or 10AS. In some embodiments, the sense strand comprises pattern 14S and the antisense strand comprises pattern 1AS, 2AS, 3AS, 4AS, 6AS, 7AS, 8AS, 9AS, or 10AS. In some embodiments, the sense strand comprises pattern 15S and the antisense strand comprises patter 1AS, 2AS, 3AS, 4AS, 5AS, 6AS, 7AS, 8AS, 9AS, or 10AS. In some embodiments, the sense strand comprises pattern 16S and the antisense strand comprises patter 1AS, 2AS, 3AS, 4AS, 5AS, 6AS, 7AS, 8AS, 9AS, or 10AS. In some embodiments, the sense strand comprises modification pattern 1AS, 2AS, 3AS, 4AS, 6AS, 7AS, 8AS, 9AS, or 10AS. In some embodiments, the antisense strand comprises modification pattern 1S, 2S, 3S, 4S, 5S, 6S, 7S, 8S, 9S, 10S, 11S, 12S, 13S, 14S, 15S, or 16S.

[0214] In some embodiments, the composition comprises an oligonucleotide that inhibits the expression of ANGPTL7, wherein the oligonucleotide comprises a siRNA comprising a sense strand and an antisense strand, wherein the sense strand and/or the antisense strand comprises one or more modifications or modification patterns. In some embodiments, the oligonucleotide comprises a nucleic acid sequence (e.g. a sense strand sequence or an antisense strand sequence) with one or more modifications or modification patterns.

[0215] In some embodiments, purines of the sense strand comprise 2′-fluoro modified purines. In some embodiments, purines of the sense strand comprise 2′-O-methyl modified purines. In some embodiments, purines of the sense strand comprise a mixture of 2′-fluoro and 2′-O-methyl modified purines. In some embodiments, all purines of the sense strand comprise 2′-fluoro modified purines. In some embodiments, all purines of the sense strand comprise 2′-O-methyl modified purines. In some embodiments, all purines of the sense strand comprise a mixture of 2′-fluoro and 2′-O-methyl modified purines.

[0216] In some embodiments, pyrimidines of the sense strand comprise 2′-fluoro modified pyrimidines. In some embodiments, pyrimidines of the sense strand comprise 2′-O-methyl modified pyrimidines. In some embodiments, pyrimidines of the sense strand comprise a mixture of 2′-fluoro and 2′-O-methyl modified pyrimidines. In some embodiments, all pyrimidines of the sense strand comprise 2′-fluoro modified pyrimidines. In some embodiments, all pyrimidines of the sense strand comprise 2′-O-methyl modified pyrimidines. In some embodiments, all pyrimidines of the sense strand comprise a mixture of 2′-fluoro and 2′-O-methyl modified pyrimidines.

[0217] In some embodiments, purines of the sense strand comprise 2′-fluoro modified purines, and pyrimidines of the sense strand comprise a mixture of 2′-fluoro and 2′-O-methyl modified pyrimidines. In some embodiments, purines of the sense strand comprise 2′-O-methyl modified purines, and pyrimidines of the sense strand comprise a mixture of 2′-fluoro and 2′-O-methyl modified pyrimidines. In some embodiments, purines of the sense strand comprise 2′-fluoro modified purines, and pyrimidines of the sense strand comprise 2′-O-methyl modified pyrimidines. In some embodiments, purines of the sense strand comprise 2′-O-methyl modified purines, and pyrimidines of the sense strand comprise 2′-fluoro modified pyrimidines. In some embodiments, pyrimidines of the sense strand comprise 2′-fluoro modified pyrimidines, and purines of the sense strand comprise a mixture of 2′-fluoro and 2′-O-methyl modified purines. In some embodiments, pyrimidines of the sense strand comprise 2′-O-methyl modified pyrimidines, and purines of the sense strand comprise a mixture of 2′-fluoro and 2′-O-methyl modified purines. In some embodiments, pyrimidines of the sense strand comprise 2′-fluoro modified pyrimidines, and purines of the sense strand comprise 2′-O-methyl modified purines. In some embodiments, pyrimidines of the sense strand comprise 2′-O-methyl modified pyrimidines, and purines of the sense strand comprise 2′-fluoro modified purines.

[0218] In some embodiments, all purines of the sense strand comprise 2′-fluoro modified purines, and all pyrimidines of the sense strand comprise a mixture of 2′-fluoro and 2′-O-methyl modified pyrimidines. In some embodiments, all purines of the sense strand comprise 2′-O-methyl modified purines, and all pyrimidines of the sense strand comprise a mixture of 2′-fluoro and 2′-O-methyl modified pyrimidines. In some embodiments, all purines of the sense strand comprise 2′-fluoro modified purines, and all pyrimidines of the sense strand comprise 2′-O-methyl modified pyrimidines. In some embodiments, all purines of the sense strand comprise 2′-O-methyl modified purines, and all pyrimidines of the sense strand comprise 2′-fluoro modified pyrimidines. In some embodiments, all pyrimidines of the sense strand comprise 2′-fluoro modified pyrimidines, and all purines of the sense strand comprise a mixture of 2′-fluoro and 2′-O-methyl modified purines. In some embodiments, all pyrimidines of the sense strand comprise 2′-O-methyl modified pyrimidines, and all purines of the sense strand comprise a mixture of 2′-fluoro and 2′-O-methyl modified purines. In some embodiments, all pyrimidines of the sense strand comprise 2′-fluoro modified pyrimidines, and all purines of the sense strand comprise 2′-O-methyl modified purines. In some embodiments, all pyrimidines of the sense strand comprise 2′-O-methyl modified pyrimidines, and all purines of the sense strand comprise 2′-fluoro modified purines.

[0219] In some embodiments, purines of the antisense strand comprise 2′-fluoro modified purines. In some embodiments, purines of the antisense strand comprise 2′-O-methyl modified purines. In some embodiments, purines of the antisense strand comprise a mixture of 2′-fluoro and 2′-O-methyl modified purines. In some embodiments, all purines of the antisense strand comprise 2′-fluoro modified purines. In some embodiments, all purines of the antisense strand comprise 2′-O-methyl modified purines. In some embodiments, all purines of the antisense strand comprise a mixture of 2′-fluoro and 2′-O-methyl modified purines.

[0220] In some embodiments, pyrimidines of the antisense strand comprise 2′-fluoro modified pyrimidines. In some embodiments, pyrimidines of the antisense strand comprise 2′-O-methyl modified pyrimidines. In some embodiments, pyrimidines of the antisense strand comprise a mixture of 2′-fluoro and 2′-O-methyl modified pyrimidines. In some embodiments, all pyrimidines of the antisense strand comprise 2′-fluoro modified pyrimidines. In some embodiments, all pyrimidines of the antisense strand comprise 2′-O-methyl modified pyrimidines. In some embodiments, all pyrimidines of the antisense strand comprise a mixture of 2′-fluoro and 2′-O-methyl modified pyrimidines.

[0221] In some embodiments, purines of the antisense strand comprise 2′-fluoro modified purines, and pyrimidines of the antisense strand comprise a mixture of 2′-fluoro and 2′-O-methyl modified pyrimidines. In some embodiments, purines of the antisense strand comprise 2′-O-methyl modified purines, and pyrimidines of the antisense strand comprise a mixture of 2′-fluoro and 2′-O-methyl modified pyrimidines. In some embodiments, purines of the antisense strand comprise 2′-fluoro modified purines, and pyrimidines of the antisense strand comprise 2′-O-methyl modified pyrimidines. In some embodiments, purines of the antisense strand comprise 2′-O-methyl modified purines, and pyrimidines of the antisense strand comprise 2′-fluoro modified pyrimidines. In some embodiments, pyrimidines of the antisense strand comprise 2′-fluoro modified pyrimidines, and purines of the antisense strand comprise a mixture of 2′-fluoro and 2′-O-methyl modified purines. In some embodiments, pyrimidines of the antisense strand comprise 2′-O-methyl modified pyrimidines, and purines of the antisense strand comprise a mixture of 2′-fluoro and 2′-O-methyl modified purines. In some embodiments, pyrimidines of the antisense strand comprise 2′-fluoro modified pyrimidines, and purines of the antisense strand comprise 2′-O-methyl modified purines. In some embodiments, pyrimidines of the antisense strand comprise 2′-O-methyl modified pyrimidines, and purines of the antisense strand comprise 2′-fluoro modified purines.

[0222] In some embodiments, all purines of the antisense strand comprise 2′-fluoro modified purines, and all pyrimidines of the antisense strand comprise a mixture of 2′-fluoro and 2′-O-methyl modified pyrimidines. In some embodiments, all purines of the antisense strand comprise 2′-O-methyl modified purines, and all pyrimidines of the antisense strand comprise a mixture of 2′-fluoro and 2′—O-methyl modified pyrimidines. In some embodiments, all purines of the antisense strand comprise 2′-fluoro modified purines, and all pyrimidines of the antisense strand comprise 2′-O-methyl modified pyrimidines. In some embodiments, all purines of the antisense strand comprise 2′-O-methyl modified purines, and all pyrimidines of the antisense strand comprise 2′-fluoro modified pyrimidines. In some embodiments, all pyrimidines of the antisense strand comprise 2′-fluoro modified pyrimidines, and all purines of the antisense strand comprise a mixture of 2′-fluoro and 2′-O-methyl modified purines. In some embodiments, all pyrimidines of the antisense strand comprise 2′-O-methyl modified pyrimidines, and all purines of the antisense strand comprise a mixture of 2′-fluoro and 2′-O-methyl modified purines. In some embodiments, all pyrimidines of the antisense strand comprise 2′-fluoro modified pyrimidines, and all purines of the antisense strand comprise 2′-O-methyl modified purines. In some embodiments, all pyrimidines of the antisense strand comprise 2′-O-methyl modified pyrimidines, and all purines of the antisense strand comprise 2′-fluoro modified purines.

[0223] In some embodiments, the nucleic acid sequence comprises or consists of sequence at least 75% identical to of any one of SEQ ID NOs: 11093-11332, at least 80% identical to of any one of SEQ ID NOs: 11093-11332, at least 85% identical to of any one of SEQ ID NOs: 11093-11332, at least 90% identical to of any one of SEQ ID NOs: 11093-11332, or at least 95% identical to of any one of SEQ ID NOs: 11093-11332. In some embodiments, the nucleic acid sequence comprises or consists of the sequence of any one of SEQ ID NOs: 11093-11332, or a sequence thereof having 1, 2, 3, or 4 nucleoside substitutions, additions, or deletions. In some embodiments, the nucleic acid sequence comprises or consists of the sequence of any one of SEQ ID NOs: 11093-11332, or a sequence thereof having 1 or 2 nucleoside substitutions, additions, or deletions. In some embodiments, the nucleic acid sequence comprises or consists of the sequence of any one of SEQ ID NOs: 11093-11332. In some embodiments, the nucleic acid sequence is an unmodified version of a nucleic acid sequence described herein. In some embodiments, the nucleic acid sequence has more or different sequence modifications than a nucleic acid sequence described herein.

[0224] In some embodiments, the nucleic acid sequence comprises or consists of sequence at least 75% identical to of any one of SEQ ID NOs: 11333-11376, at least 80% identical to of any one of SEQ ID NOs: 11333-11376, at least 85% identical to of any one of SEQ ID NOs: 11333-11376, at least 90% identical to of any one of SEQ ID NOs: 11333-11376, or at least 95% identical to of any one of SEQ ID NOs: 11333-11376. In some embodiments, the nucleic acid sequence comprises or consists of the sequence of any one of SEQ ID NOs: 11333-11376, or a sequence thereof having 1, 2, 3, or 4 nucleoside substitutions, additions, or deletions. In some embodiments, the nucleic acid sequence comprises or consists of the sequence of any one of SEQ ID NOs: 11333-11376, or a sequence thereof having 1 or 2 nucleoside substitutions, additions, or deletions. In some embodiments, the nucleic acid sequence comprises or consists of the sequence of any one of SEQ ID NOs: 11333-11376. In some embodiments, the nucleic acid sequence lacks the sequence modifications, or has different or additional sequence modifications, but otherwise is similar to a sequence described herein.

[0225] In some embodiments, the nucleic acid sequence comprises or consists of a sequence at least 75% identical to of any one of SEQ ID NOs: 11402-11449 or 11500-11507, at least 80% identical to of any one of SEQ ID NOs: 11402-11449 or 11500-11507, at least 85% identical to of any one of SEQ ID NOs: 11402-11449 or 11500-11507, at least 90% identical to of any one of SEQ ID NOs: 11402-11449 or 11500-11507, or at least 95% identical to of any one of SEQ ID NOs: 11402-11449 or 11500-11507. In some embodiments, the nucleic acid sequence comprises or consists of the sequence of any one of SEQ ID NOs: 11402-11449 or 11500-11507, or a sequence thereof having 1, 2, 3, or 4 nucleoside substitutions, additions, or deletions. In some embodiments, the nucleic acid sequence comprises or consists of the sequence of any one of SEQ ID NOs: 11402-11449 or 11500-11507, or a sequence thereof having 1 or 2 nucleoside substitutions, additions, or deletions. In some embodiments, the nucleic acid sequence comprises or consists of the sequence of any one of SEQ ID NOs: 11402-11449 or 11500-11507. In some embodiments, the nucleic acid sequence lacks the sequence modifications, or has different or additional sequence modifications, but otherwise is similar to a sequence described herein.

[0226] In some embodiments, the oligonucleotide comprises or consists of any one of the siRNAs disclosed in any of Tables 4-20, or an siRNA thereof having 1 or 2 nucleoside substitutions, additions, or deletions. In some embodiments, the oligonucleotide comprises or consists of any one of the siRNAs disclosed in any of Tables 4-20. In some embodiments, the oligonucleotide comprises a nucleoside sequence at least 85% identical the sense strand sequence of an siRNA in any of Tables 4-20.

[0227] In some embodiments, the oligonucleotide comprises or consists of any one of the siRNAs disclosed in any of Tables 4-9, 14, 15, 17, or 18, or an siRNA thereof having 1 or 2 nucleoside substitutions, additions, or deletions. In some embodiments, the oligonucleotide comprises or consists of any one of the siRNAs disclosed in any of Tables 4-9, 14, 15, 17, or 18. In some embodiments, the oligonucleotide comprises or consists of any one of the siRNAs disclosed in any of Tables 4-9, 14, 15, 17, or 18 where a relative ANGPTL expression in the table is below 1, or an siRNA thereof having 1 or 2 nucleoside substitutions, additions, or deletions. In some embodiments, the oligonucleotide comprises or consists of any one of the siRNAs disclosed in any of Tables 4-9, 14, 15, 17, or 18 where a relative ANGPTL expression in the table is below 1. In some embodiments, the oligonucleotide comprises or consists of any one of the siRNAs disclosed in any of Tables 4-9, 14, 15, 17, or 18 where a relative ANGPTL expression of the siRNA in the table is below the expression of a negative control in the table, or an siRNA thereof having 1 or 2 nucleoside substitutions, additions, or deletions. In some embodiments, the oligonucleotide comprises or consists of any one of the siRNAs disclosed in any of Tables 4-9, 14, 15, 17, or 18 where a relative ANGPTL expression of the siRNA in the table is below the expression of a negative control in the table. In some embodiments, the oligonucleotide comprises or consists of any one of the siRNAs disclosed in any of Tables 4-9, 14, 15, 17, or 18 where a relative ANGPTL expression in the table is below 0.5, or an siRNA thereof having 1 or 2 nucleoside substitutions, additions, or deletions. In some embodiments, the oligonucleotide comprises or consists of any one of the siRNAs disclosed in any of Tables 4-9, 14, 15, 17, or 18 where a relative ANGPTL expression in the table is below 0.5. In some embodiments, the oligonucleotide comprises or consists of any one of the siRNAs disclosed in any of Tables 4-9, 14, 15, 17, or 18 where a relative ANGPTL expression in the table is below 0.25, or an siRNA thereof having 1 or 2 nucleoside substitutions, additions, or deletions. In some embodiments, the oligonucleotide comprises or consists of any one of the siRNAs disclosed in any of Tables 4-9, 14, 15, 17, or 18 where a relative ANGPTL expression in the table is below 0.25. In some embodiments, the oligonucleotide comprises or consists of an unmodified version of any one of the siRNAs disclosed in any of Tables 4-9, 14, 15, 17, or 18. In some embodiments, the oligonucleotide comprises or consists of an siRNA with the nucleic acid sequence of any one of the siRNAs disclosed in any of Tables 4-9, 14, 15, 17, or 18, but with one or more additional or different modifications, or with a different modification pattern. In some embodiments, the nucleic acid sequence lacks the sequence modifications, or has different or additional sequence modifications, but otherwise is similar to a sequence described herein.

[0228] In some embodiments, the sense strand comprises a sense strand sequence with one or more modifications or modification patterns. In some embodiments, the sense strand sequence comprises or consists of sequence at least 75% identical to of any one of SEQ ID NOs: 11093-11212, at least 80% identical to of any one of SEQ ID NOs: 11093-11212, at least 85% identical to of any one of SEQ ID NOs: 11093-11212, at least 90% identical to of any one of SEQ ID NOs: 11093-11212, or at least 95% identical to of any one of SEQ ID NOs: 11093-11212. In some embodiments, the sense strand sequence comprises or consists of the sequence of any one of SEQ ID NOs: 11093-11212, or a sequence thereof having 1, 2, 3, or 4 nucleoside substitutions, additions, or deletions. In some embodiments, the sense strand sequence comprises or consists of the sequence of any one of SEQ ID NOs: 11093-11212, or a sequence thereof having 1 or 2 nucleoside substitutions, additions, or deletions. In some embodiments, the sense strand sequence comprises or consists of the sequence of any one of SEQ ID NOs: 11093-11212. In some embodiments, the sense strand sequence is an unmodified version of a sense strand sequence described herein. In some embodiments, the sense strand sequence has more or different sequence modifications than a sense strand sequence described herein.

[0229] In some embodiments, the sense strand sequence comprises or consists of sequence at least 75% identical to of any one of SEQ ID NOs: 11333-11354, at least 80% identical to of any one of SEQ ID NOs: 11333-11354, at least 85% identical to of any one of SEQ ID NOs: 11333-11354, at least 90% identical to of any one of SEQ ID NOs: 11333-11354, or at least 95% identical to of any one of SEQ ID NOs: 11333-11354. In some embodiments, the sense strand sequence comprises or consists of the sequence of any one of SEQ ID NOs: 11333-11354, or a sequence thereof having 1, 2, 3, or 4 nucleoside substitutions, additions, or deletions. In some embodiments, the sense strand sequence comprises or consists of the sequence of any one of SEQ ID NOs: 11333-11354, or a sequence thereof having 1 or 2 nucleoside substitutions, additions, or deletions. In some embodiments, the sense strand sequence comprises or consists of the sequence of any one of SEQ ID NOs: 11333-11354. In some embodiments, the sense strand sequence lacks the sequence modifications, or has different or additional sequence modifications, but otherwise is similar to a sequence described herein.

[0230] In some embodiments, the sense strand sequence comprises or consists of sequence at least 75% identical to of any one of SEQ ID NOs: 11402-11421, 11442-11445, or 11500-11503; at least 80% identical to of any one of SEQ ID NOs: 11402-11421, 11442-11445, or 11500-11503; at least 85% identical to of any one of SEQ ID NOs: 11402-11421, 11442-11445, or 11500-11503; at least 90% identical to of any one of SEQ ID NOs: 11402-11421, 11442-11445, or 11500-11503; or at least 95% identical to of any one of SEQ ID NOs: 11402-11421, 11442-11445, or 11500-11503. In some embodiments, the sense strand sequence comprises or consists of the sequence of any one of SEQ ID NOs: 11402-11421, 11442-11445, or 11500-11503, ora sequence thereof having 1, 2, 3, or 4 nucleoside substitutions, additions, or deletions. In some embodiments, the sense strand sequence comprises or consists of the sequence of any one of SEQ ID NOs: 11402-11421, 11442-11445, or 11500-11503, or a sequence thereof having 1 or 2 nucleoside substitutions, additions, or deletions. In some embodiments, the sense strand sequence comprises or consists of the sequence of any one of SEQ ID NOs: 11402-11421, 11442-11445, or 11500-11503. In some embodiments, the sense strand sequence lacks the sequence modifications, or has different or additional sequence modifications, but otherwise is similar to a sequence described herein.

[0231] In some embodiments, the sense strand sequence comprises or consists of a sense strand sequence of a sense strand sequence of any one of the siRNAs disclosed in any of Tables 4-20, or an siRNA thereof having 1 or 2 nucleoside substitutions, additions, or deletions. In some embodiments, the sense strand sequence comprises or consists of a sense strand sequence of a sense strand sequence of any one of the siRNAs disclosed in any of Tables 4-20. In some embodiments, the sense strand sequence comprises or consists of a sequence at least 75% identical, at least 80% identical, at least 85% identical, at least 90% identical, or at least 95% identical to a sense strand sequence of an siRNA in any of Tables 4-20.

[0232] In some embodiments, the sense strand sequence comprises or consists of a sense strand sequence of a sense strand sequence of any one of the siRNAs disclosed in any of Tables 4-9, 14, 15, 17, or 18, or an siRNA thereof having 1 or 2 nucleoside substitutions, additions, or deletions. In some embodiments, the sense strand sequence comprises or consists of a sense strand sequence of any one of the siRNAs disclosed in any of Tables 4-9, 14, 15, 17, or 18. In some embodiments, the sense strand sequence comprises or consists of a sense strand sequence of any one of the siRNAs disclosed in any of Tables 4-9, 14, 15, 17, or 18 where a relative ANGPTL expression in the table is below 1, or an siRNA thereof having 1 or 2 nucleoside substitutions, additions, or deletions. In some embodiments, the sense strand sequence comprises or consists of a sense strand sequence of any one of the siRNAs disclosed in any of Tables 4-9, 14, 15, 17, or 18 where a relative ANGPTL expression in the table is below 1. In some embodiments, the sense strand sequence comprises or consists of a sense strand sequence of any one of the siRNAs disclosed in any of Tables 4-9, 14, 15, 17, or 18 where a relative ANGPTL expression of the siRNA in the table is below the expression of a negative control in the table, or an siRNA thereof having 1 or 2 nucleoside substitutions, additions, or deletions. In some embodiments, the sense strand sequence comprises or consists of a sense strand sequence of any one of the siRNAs disclosed in any of Tables 4-9, 14, 15, 17, or 18 where a relative ANGPTL expression of the siRNA in the table is below the expression of a negative control in the table. In some embodiments, the sense strand sequence comprises or consists of a sense strand sequence of any one of the siRNAs disclosed in any of Tables 4-9, 14, 15, 17, or 18 where a relative ANGPTL expression in the table is below 0.5, or an siRNA thereof having 1 or 2 nucleoside substitutions, additions, or deletions. In some embodiments, the sense strand sequence comprises or consists of a sense strand sequence of any one of the siRNAs disclosed in any of Tables 4-9, 14, 15, 17, or 18 where a relative ANGPTL expression in the table is below 0.5. In some embodiments, the sense strand sequence comprises or consists of a sense strand sequence of any one of the siRNAs disclosed in any of Tables 4-9, 14, 15, 17, or 18 where a relative ANGPTL expression in the table is below 0.25, or an siRNA thereof having 1 or 2 nucleoside substitutions, additions, or deletions. In some embodiments, the sense strand sequence comprises or consists of a sense strand sequence of any one of the siRNAs disclosed in any of Tables 4-9, 14, 15, 17, or 18 where a relative ANGPTL expression in the table is below 0.25. In some embodiments, the sense strand sequence comprises or consists of an unmodified version of a sense strand sequence of any one of the siRNAs disclosed in any of Tables 4-9, 14, 15, 17, or 18. In some embodiments, the sense strand sequence comprises or consists of an siRNA with the sense strand sequence of a sense strand sequence of any one of the siRNAs disclosed in any of Tables 4-9, 14, 15, 17, or 18, but with one or more additional or different modifications, or with a different modification pattern. In some embodiments, the sense strand sequence lacks the sequence modifications, or has different or additional sequence modifications, but otherwise is similar to a sequence described herein.

[0233] In some embodiments, the sense strand sequence comprises or consists of a sense strand sequence of any one of the siRNAs disclosed in Table 4, or an siRNA thereof having 1 or 2 nucleoside substitutions, additions, or deletions. In some embodiments, the sense strand sequence comprises or consists of a sense strand sequence of any one of the siRNAs disclosed in Table 4. In some embodiments, the sense strand sequence comprises or consists of a sense strand sequence of any one of the siRNAs disclosed in Table 4 where the relative ANGPTL expression in the table is below 1, or an siRNA thereof having 1 or 2 nucleoside substitutions, additions, or deletions. In some embodiments, the sense strand sequence comprises or consists of a sense strand sequence of any one of the siRNAs disclosed in Table 4 where the relative ANGPTL expression in the table is below 1. In some embodiments, the sense strand sequence comprises or consists of a sense strand sequence of any one of the siRNAs disclosed in Table 4 where the relative ANGPTL expression of the siRNA in the table is below the expression of the negative control siRNA in the table (e.g. below a relative expression level of 0.67), or an siRNA thereof having 1 or 2 nucleoside substitutions, additions, or deletions. In some embodiments, the sense strand sequence comprises or consists of a sense strand sequence of any one of the siRNAs disclosed in Table 4 where the relative ANGPTL expression of the siRNA in the table is below the expression of the negative control siRNA in the table (e.g. below a relative expression level of 0.67). In some embodiments, the sense strand sequence comprises or consists of a sense strand sequence of any one of the siRNAs disclosed in Table 4 where the relative ANGPTL expression in the table is below 0.5, or an siRNA thereof having 1 or 2 nucleoside substitutions, additions, or deletions. In some embodiments, the sense strand sequence comprises or consists of a sense strand sequence of any one of the siRNAs disclosed in Table 4 where the relative ANGPTL expression in the table is below 0.5. In some embodiments, the sense strand sequence comprises or consists of a sense strand sequence of any one of the siRNAs disclosed in Table 4 where the relative ANGPTL expression in the table is below 0.25, or an siRNA thereof having 1 or 2 nucleoside substitutions, additions, or deletions. In some embodiments, the sense strand sequence comprises or consists of a sense strand sequence of any one of the siRNAs disclosed in Table 4 where the relative ANGPTL expression in the table is below 0.25. In some embodiments, the sense strand sequence comprises or consists of an unmodified version of a sense strand sequence of any one of the siRNAs disclosed in Table 4. In some embodiments, the sense strand sequence comprises or consists of an siRNA with the sense strand sequence of a sense strand sequence of any one of the siRNAs disclosed in Table 4, but with one or more additional or different modifications, or with a different modification pattern. In some embodiments, the sense strand sequence lacks the sequence modifications, or has different or additional sequence modifications, but otherwise is similar to a sequence described herein.

[0234] In some embodiments, the sense strand sequence is incorporated into an siRNA that downregulates ANGPTL7. In some embodiments, the sense strand sequence comprises or consists of a sense strand sequence of any one of SEQ ID NOs: 11094, 11095, 11096, 11097, 11098, 11099, 11100, 11101, 11102, 11103, 11104, 11105, 11106, 11109, 11110, 11113, 11116, 11118, 11119, 11121, 11122, 11123, 11124, 11125, 11126, 11127, 11128, 11129, 11130, 11132, 11133, 11134, 11135, 11136, 11139, 11140, 11143, 11144, 11145, 11146, 11147, 11148, 11149, 11150, 11151, 11152, 11153, 11154, 11155, 11156, 11157, 11158, 11159, 11160, 11161, 11162, 11163, 11164, 11165, 11166, 11167, 11168, 11169, 11170, 11171, 11172, 11173, 11174, 11175, 11176, 11177, 11178, 11180, 11181, 11182, 11183, 11184, 11185, 11186, 11187, 11188, 11189, 11191, 11193, 11195, 11196, 11198, 11199, 11200, 11201, 11203, 11204, 11205, 11207, 11208, 11210, 11211, or 11212, 11377, 11442, 11445, 11500, 11501, 11502, 11503, or an siRNA thereof having 1 or 2 nucleoside substitutions, additions, or deletions. In some embodiments, the sense strand sequence comprises or consists of a sense strand sequence of any one of SEQ ID NOs: 11094, 11095, 11096, 11097, 11098, 11099, 11100, 11101, 11102, 11103, 11104, 11105, 11106, 11109, 11110, 11113, 11116, 11118, 11119, 11121, 11122, 11123, 11124, 11125, 11126, 11127, 11128, 11129, 11130, 11132, 11133, 11134, 11135, 11136, 11139, 11140, 11143, 11144, 11145, 11146, 11147, 11148, 11149, 11150, 11151, 11152, 11153, 11154, 11155, 11156, 11157, 11158, 11159, 11160, 11161, 11162, 11163, 11164, 11165, 11166, 11167, 11168, 11169, 11170, 11171, 11172, 11173, 11174, 11175, 11176, 11177, 11178, 11180, 11181, 11182, 11183, 11184, 11185, 11186, 11187, 11188, 11189, 11191, 11193, 11195, 11196, 11198, 11199, 11200, 11201, 11203, 11204, 11205, 11207, 11208, 11210, 11211, 11212, 11377, 11442, 11445, 11500, 11501, 11502, or 11503.

[0235] In some embodiments, the sense strand sequence comprises or consists of a sense strand sequence of any one of the siRNAs disclosed in Table 5, or an siRNA thereof having 1 or 2 nucleoside substitutions, additions, or deletions. In some embodiments, the sense strand sequence comprises or consists of a sense strand sequence of any one of the siRNAs disclosed in Table 5. In some embodiments, the sense strand sequence comprises or consists of a sense strand sequence of any one of the siRNAs disclosed in Table 5 where the relative ANGPTL expression in the table is below 1, or an siRNA thereof having 1 or 2 nucleoside substitutions, additions, or deletions. In some embodiments, the sense strand sequence comprises or consists of a sense strand sequence of any one of the siRNAs disclosed in Table 5 where the relative ANGPTL expression in the table is below 1. In some embodiments, the sense strand sequence comprises or consists of a sense strand sequence of any one of the siRNAs disclosed in Table 5 where the relative ANGPTL expression of the siRNA in the table is below the expression of the negative control siRNA in the table (e.g. below a relative expression level of 1.06), or an siRNA thereof having 1 or 2 nucleoside substitutions, additions, or deletions. In some embodiments, the sense strand sequence comprises or consists of a sense strand sequence of any one of the siRNAs disclosed in Table 5 where the relative ANGPTL expression of the siRNA in the table is below the expression of the negative control siRNA in the table (e.g. below a relative expression level of 1.06). In some embodiments, the sense strand sequence comprises or consists of a sense strand sequence of any one of the siRNAs disclosed in Table 5 where the relative ANGPTL expression in the table is below 0.5, or an siRNA thereof having 1 or 2 nucleoside substitutions, additions, or deletions. In some embodiments, the sense strand sequence comprises or consists of a sense strand sequence of any one of the siRNAs disclosed in Table 5 where the relative ANGPTL expression in the table is below 0.5. In some embodiments, the sense strand sequence comprises or consists of a sense strand sequence of any one of the siRNAs disclosed in Table 5 where the relative ANGPTL expression in the table is below 0.25, or an siRNA thereof having 1 or 2 nucleoside substitutions, additions, or deletions. In some embodiments, the sense strand sequence comprises or consists of a sense strand sequence of any one of the siRNAs disclosed in Table 5 where the relative ANGPTL expression in the table is below 0.25. In some embodiments, the sense strand sequence comprises or consists of an unmodified version of a sense strand sequence of any one of the siRNAs disclosed in Table 5. In some embodiments, the sense strand sequence comprises or consists of an siRNA with the sense strand sequence of a sense strand sequence of any one of the siRNAs disclosed in Table 5, but with one or more additional or different modifications, or with a different modification pattern. In some embodiments, the sense strand sequence lacks the sequence modifications, or has different or additional sequence modifications, but otherwise is similar to a sequence described herein.

[0236] In some embodiments, the sense strand sequence comprises or consists of a sense strand sequence of any one of the siRNAs disclosed in Table 6, or an siRNA thereof having 1 or 2 nucleoside substitutions, additions, or deletions. In some embodiments, the sense strand sequence comprises or consists of a sense strand sequence of any one of the siRNAs disclosed in Table 6. In some embodiments, the sense strand sequence comprises or consists of a sense strand sequence of any one of the siRNAs disclosed in Table 6 where the relative ANGPTL expression at 1 nM in the table is below 1, or an siRNA thereof having 1 or 2 nucleoside substitutions, additions, or deletions. In some embodiments, the sense strand sequence comprises or consists of a sense strand sequence of any one of the siRNAs disclosed in Table 6 where the relative ANGPTL expression at 1 nM in the table is below 1. In some embodiments, the sense strand sequence comprises or consists of a sense strand sequence of any one of the siRNAs disclosed in Table 6 where the relative ANGPTL expression at 1 nM of the siRNA in the table is below the expression of the negative control siRNA in the table (e.g. below a relative expression level of 0.66), or an siRNA thereof having 1 or 2 nucleoside substitutions, additions, or deletions. In some embodiments, the sense strand sequence comprises or consists of a sense strand sequence of any one of the siRNAs disclosed in Table 6 where the relative ANGPTL expression at 1 nM of the siRNA in the table is below the expression of the negative control siRNA in the table (e.g. below a relative expression level of 0.66). In some embodiments, the sense strand sequence comprises or consists of a sense strand sequence of any one of the siRNAs disclosed in Table 6 where the relative ANGPTL expression at 1 nM in the table is below 0.5, or an siRNA thereof having 1 or 2 nucleoside substitutions, additions, or deletions. In some embodiments, the sense strand sequence comprises or consists of a sense strand sequence of any one of the siRNAs disclosed in Table 6 where the relative ANGPTL expression at 1 nM in the table is below 0.5 (e.g. an siRNA with the sequence of ETD00245, ETD00247, or ETD00252). In some embodiments, the sense strand sequence comprises or consists of a sense strand sequence of any one of the siRNAs disclosed in Table 6 where the relative ANGPTL expression at 10 nM in the table is below 1, or an siRNA thereof having 1 or 2 nucleoside substitutions, additions, or deletions. In some embodiments, the sense strand sequence comprises or consists of a sense strand sequence of any one of the siRNAs disclosed in Table 6 where the relative ANGPTL expression at 10 nM in the table is below 1. In some embodiments, the sense strand sequence comprises or consists of an unmodified version of a sense strand sequence of any one of the siRNAs disclosed in Table 6. In some embodiments, the sense strand sequence comprises or consists of an siRNA with the sense strand sequence of a sense strand sequence of any one of the siRNAs disclosed in Table 6, but with one or more additional or different modifications, or with a different modification pattern. In some embodiments, the sense strand sequence lacks the sequence modifications, or has different or additional sequence modifications, but otherwise is similar to a sequence described herein.

[0237] In some embodiments, the sense strand sequence comprises or consists of a sense strand sequence of any one of the siRNAs disclosed in Table 7, or an siRNA thereof having 1 or 2 nucleoside substitutions, additions, or deletions. In some embodiments, the sense strand sequence comprises or consists of a sense strand sequence of any one of the siRNAs disclosed in Table 7. In some embodiments, the sense strand sequence comprises or consists of a sense strand sequence of any one of the siRNAs disclosed in Table 8, or an siRNA thereof having 1 or 2 nucleoside substitutions, additions, or deletions. In some embodiments, the sense strand sequence comprises or consists of a sense strand sequence of any one of the siRNAs disclosed in Table 8. In some embodiments, the sense strand sequence comprises or consists of a sense strand sequence of any one of the siRNAs disclosed in Table 9, or an siRNA thereof having 1 or 2 nucleoside substitutions, additions, or deletions. In some embodiments, the sense strand sequence comprises or consists of a sense strand sequence of any one of the siRNAs disclosed in Table 9. In some embodiments, the sense strand sequence lacks the sequence modifications, or has different or additional sequence modifications, but otherwise is similar to a sequence described herein.

[0238] In some embodiments, the sense strand sequence comprises or consists of a sense strand sequence of any one of the siRNAs disclosed in Table 10, or an siRNA thereof having 1 or 2 nucleoside substitutions, additions, or deletions. In some embodiments, the sense strand sequence comprises or consists of a sense strand sequence of any one of the siRNAs disclosed in Table 10. In some embodiments, the sense strand sequence comprises or consists of a sense strand sequence of any one of the siRNAs disclosed in Table 10 where the percent of the siRNA remaining at 4 hours in the table is at least 50%, or an siRNA thereof having 1 or 2 nucleoside substitutions, additions, or deletions. In some embodiments, the sense strand sequence comprises or consists of a sense strand sequence of any one of the siRNAs disclosed in Table 10 where the percent of the siRNA remaining at 4 hours in the table is at least 50%. In some embodiments, the sense strand sequence comprises or consists of a sense strand sequence of any one of the siRNAs disclosed in Table 10 where the percent of the siRNA remaining at 4 hours in the table is at least 75%, or an siRNA thereof having 1 or 2 nucleoside substitutions, additions, or deletions. In some embodiments, the sense strand sequence comprises or consists of a sense strand sequence of any one of the siRNAs disclosed in Table 10 where the percent of the siRNA remaining at 4 hours in the table is at least 75%. In some embodiments, the sense strand sequence comprises or consists of a sense strand sequence of any one of the siRNAs disclosed in Table 10 where the percent of the siRNA remaining at 24 hours in the table is at least 50%, or an siRNA thereof having 1 or 2 nucleoside substitutions, additions, or deletions. In some embodiments, the sense strand sequence comprises or consists of a sense strand sequence of any one of the siRNAs disclosed in Table 10 where the percent of the siRNA remaining at 24 hours in the table is at least 50%. In some embodiments, the sense strand sequence comprises or consists of a sense strand sequence of any one of the siRNAs disclosed in Table 10 where the percent of the siRNA remaining at 24 hours in the table is at least 75%, or an siRNA thereof having 1 or 2 nucleoside substitutions, additions, or deletions. In some embodiments, the sense strand sequence comprises or consists of a sense strand sequence of any one of the siRNAs disclosed in Table 10 where the percent of the siRNA remaining at 24 hours in the table is at least 75%. In some embodiments, the sense strand sequence comprises or consists of an unmodified version of a sense strand sequence of any one of the siRNAs disclosed in Table 10. In some embodiments, the sense strand sequence comprises or consists of an siRNA with the sense strand sequence of a sense strand sequence of any one of the siRNAs disclosed in Table 10, but with one or more additional or different modifications, or with a different modification pattern. In some embodiments, the sense strand sequence lacks the sequence modifications, or has different or additional sequence modifications, but otherwise is similar to a sequence described herein.

[0239] In some embodiments, the sense strand sequence comprises or consists of a sense strand sequence of any one of the siRNAs disclosed in Table 11, or an siRNA thereof having 1 or 2 nucleoside substitutions, additions, or deletions. In some embodiments, the sense strand sequence comprises or consists of a sense strand sequence of any one of the siRNAs disclosed in Table 11. In some embodiments, the sense strand sequence comprises or consists of a sense strand sequence of any one of the siRNAs disclosed in Table 12, or an siRNA thereof having 1 or 2 nucleoside substitutions, additions, or deletions. In some embodiments, the sense strand sequence comprises or consists of a sense strand sequence of any one of the siRNAs disclosed in Table 12. In some embodiments, the sense strand sequence lacks the sequence modifications, or has different or additional sequence modifications, but otherwise is similar to a sequence described herein.

[0240] In some embodiments, the sense strand sequence comprises or consists of the sequence of the sense strand of siRNA ETD00269, or an siRNA thereof having 1 or 2 nucleoside substitutions, additions, or deletions. In some embodiments, the sense strand sequence comprises or consists of the sequence of the sense strand of siRNA ETD00269. In some embodiments, the sense strand sequence comprises or consists of the sequence of the sense strand of siRNA ETD00270, or an siRNA thereof having 1 or 2 nucleoside substitutions, additions, or deletions. In some embodiments, the sense strand sequence comprises or consists of the sequence of the sense strand of siRNA ETD00270. In some embodiments, the sense strand sequence comprises or consists of the sequence of the sense strand of siRNA ETD00353, or an siRNA thereof having 1 or 2 nucleoside substitutions, additions, or deletions. In some embodiments, the sense strand sequence comprises or consists of the sequence of the sense strand of siRNA ETD00353. In some embodiments, the sense strand sequence comprises or consists of the sequence of the sense strand of siRNA ETD00356, or an siRNA thereof having 1 or 2 nucleoside substitutions, additions, or deletions. In some embodiments, the sense strand sequence comprises or consists of the sequence of the sense strand of siRNA ETD00356. In some embodiments, the sense strand sequence comprises or consists of the sequence of the sense strand of siRNA ETD00358, or an siRNA thereof having 1 or 2 nucleoside substitutions, additions, or deletions. In some embodiments, the sense strand sequence comprises or consists of the sequence of the sense strand of siRNA ETD00358. In some embodiments, the sense strand sequence comprises or consists of the sequence of the sense strand of siRNA ETD00370, or an siRNA thereof having 1 or 2 nucleoside substitutions, additions, or deletions. In some embodiments, the sense strand sequence comprises or consists of the sequence of the sense strand of siRNA ETD00370. In some embodiments, the sense strand sequence comprises or consists of the sequence of the sense strand of siRNA ETD00377, or an siRNA thereof having 1 or 2 nucleoside substitutions, additions, or deletions. In some embodiments, the sense strand sequence comprises or consists of the sequence of the sense strand of siRNA ETD00377. In some embodiments, the sense strand sequence comprises or consists of the sequence of the sense strand of siRNA ETD00378, or an siRNA thereof having 1 or 2 nucleoside substitutions, additions, or deletions. In some embodiments, the sense strand sequence comprises or consists of the sequence of the sense strand of siRNA ETD00378. In some embodiments, the sense strand sequence comprises or consists of the sequence of the sense strand of siRNA ETD00382, or an siRNA thereof having 1 or 2 nucleoside substitutions, additions, or deletions. In some embodiments, the sense strand sequence comprises or consists of the sequence of the sense strand of siRNA ETD00382. In some embodiments, the sense strand sequence comprises or consists of the sequence of SEQ ID NO: 11377, or an siRNA thereof having 1 or 2 nucleoside substitutions, additions, or deletions. In some embodiments, the sense strand sequence comprises or consists of the sequence of SEQ ID NO: 11377. In some embodiments, the sense strand sequence comprises or consists of the sequence of SEQ ID NO: 11378, or an siRNA thereof having 1 or 2 nucleoside substitutions, additions, or deletions. In some embodiments, the sense strand sequence comprises or consists of the sequence of SEQ ID NO: 11387. In some embodiments, the sense strand sequence lacks the sequence modifications, or has different or additional sequence modifications, but otherwise is similar to a sequence described herein.

[0241] In some embodiments, the sense strand sequence comprises or consists of the sequence of the sense strand of siRNA ETD00752, or an siRNA thereof having 1 or 2 nucleoside substitutions, additions, or deletions. In some embodiments, the sense strand sequence comprises or consists of the sequence of the sense strand of siRNA ETD00752. In some embodiments, the sense strand sequence comprises or consists of the sequence of the sense strand of siRNA ETD01040, or an siRNA thereof having 1 or 2 nucleoside substitutions, additions, or deletions. In some embodiments, the sense strand sequence comprises or consists of the sequence of the sense strand of siRNA ETD01040. In some embodiments, the sense strand sequence comprises or consists of the sequence of the sense strand of siRNA ETD01043, or an siRNA thereof having 1 or 2 nucleoside substitutions, additions, or deletions. In some embodiments, the sense strand sequence comprises or consists of the sequence of the sense strand of siRNA ETD01043. In some embodiments, the sense strand sequence comprises or consists of the sequence of SEQ ID NO: 11377, or an siRNA thereof having 1 or 2 nucleoside substitutions, additions, or deletions. In some embodiments, the sense strand sequence comprises or consists of the sequence of SEQ ID NO: 11377. In some embodiments, the sense strand sequence comprises or consists of the sequence of SEQ ID NO: 11442, or an siRNA thereof having 1 or 2 nucleoside substitutions, additions, or deletions. In some embodiments, the sense strand sequence comprises or consists of the sequence of SEQ ID NO: 11442. In some embodiments, the sense strand sequence comprises or consists of the sequence of SEQ ID NO: 11445, or an siRNA thereof having 1 or 2 nucleoside substitutions, additions, or deletions. In some embodiments, the sense strand sequence comprises or consists of the sequence of SEQ ID NO: 11445. In some embodiments, the sense strand sequence comprises or consists of the sequence of SEQ ID NO: 11500, or an siRNA thereof having 1 or 2 nucleoside substitutions, additions, or deletions. In some embodiments, the sense strand sequence comprises or consists of the sequence of SEQ ID NO: 11500. In some embodiments, the sense strand sequence comprises or consists of the sequence of SEQ ID NO: 11501, or an siRNA thereof having 1 or 2 nucleoside substitutions, additions, or deletions. In some embodiments, the sense strand sequence comprises or consists of the sequence of SEQ ID NO: 11501. In some embodiments, the sense strand sequence comprises or consists of the sequence of SEQ ID NO: 11502, or an siRNA thereof having 1 or 2 nucleoside substitutions, additions, or deletions. In some embodiments, the sense strand sequence comprises or consists of the sequence of SEQ ID NO: 11502. In some embodiments, the sense strand sequence comprises or consists of the sequence of SEQ ID NO: 11503, or an siRNA thereof having 1 or 2 nucleoside substitutions, additions, or deletions. In some embodiments, the sense strand sequence comprises or consists of the sequence of SEQ ID NO: 11503. In some embodiments, the sense strand sequence lacks the sequence modifications, or has different or additional sequence modifications, but otherwise is similar to a sequence described herein.

[0242] In some embodiments, the antisense strand comprises an antisense strand sequence with one or more modifications or modification patterns. In some embodiments, the antisense strand sequence comprises or consists of sequence at least 75% identical to of any one of SEQ ID NOs: 11093-11212, at least 80% identical to of any one of SEQ ID NOs: 11093-11212, at least 85% identical to of any one of SEQ ID NOs: 11093-11212, at least 90% identical to of any one of SEQ ID NOs: 11093-11212, or at least 95% identical to of any one of SEQ ID NOs: 11093-11212. In some embodiments, the antisense strand sequence comprises or consists of the sequence of any one of SEQ ID NOs: 11093-11212, or a sequence thereof having 1, 2, 3, or 4 nucleoside substitutions, additions, or deletions. In some embodiments, the antisense strand sequence comprises or consists of the sequence of any one of SEQ ID NOs: 11093-11212, or a sequence thereof having 1 or 2 nucleoside substitutions, additions, or deletions. In some embodiments, the antisense strand sequence comprises or consists of the sequence of any one of SEQ ID NOs: 11093-11212. In some embodiments, the antisense strand sequence is an unmodified version of an antisense strand sequence described herein. In some embodiments, the antisense strand sequence has more or different sequence modifications than an antisense strand sequence described herein.

[0243] In some embodiments, the antisense strand sequence comprises or consists of sequence at least 75% identical to of any one of SEQ ID NOs: 11333-11354, at least 80% identical to of any one of SEQ ID NOs: 11333-11354, at least 85% identical to of any one of SEQ ID NOs: 11333-11354, at least 90% identical to of any one of SEQ ID NOs: 11333-11354, or at least 95% identical to of any one of SEQ ID NOs: 11333-11354. In some embodiments, the antisense strand sequence comprises or consists of the sequence of any one of SEQ ID NOs: 11333-11354, or a sequence thereof having 1, 2, 3, or 4 nucleoside substitutions, additions, or deletions. In some embodiments, the antisense strand sequence comprises or consists of the sequence of any one of SEQ ID NOs: 11333-11354, or a sequence thereof having 1 or 2 nucleoside substitutions, additions, or deletions. In some embodiments, the antisense strand sequence comprises or consists of the sequence of any one of SEQ ID NOs: 11333-11354. In some embodiments, the antisense strand sequence lacks the sequence modifications, or has different or additional sequence modifications, but otherwise is similar to a sequence described herein.

[0244] In some embodiments, the antisense strand sequence comprises or consists of sequence at least 75% identical to of any one of SEQ ID NOs: 11422-11441, 11446-11449, or 11504-11507; at least 80% identical to of any one of SEQ ID NOs: 11422-11441, 11446-11449, or 11504-11507; at least 85% identical to of any one of SEQ ID NOs: 11422-11441, 11446-11449, or 11504-11507; at least 90% identical to of any one of SEQ ID NOs: 11422-11441, 11446-11449, or 11504-11507; or at least 95% identical to of any one of SEQ ID NOs: 11422-11441, 11446-11449, or 11504-11507. In some embodiments, the antisense strand sequence comprises or consists of the sequence of any one of SEQ ID NOs: 11422-11441, 11446-11449, 11504-11507, or a sequence thereof having 1, 2, 3, or 4 nucleoside substitutions, additions, or deletions. In some embodiments, the antisense strand sequence comprises or consists of the sequence of any one of SEQ ID NOs: 11422-11441, 11446-11449, 11504-11507, or a sequence thereof having 1 or 2 nucleoside substitutions, additions, or deletions. In some embodiments, the antisense strand sequence comprises or consists of the sequence of any one of SEQ ID NOs: 11422-11441, 11446-11449, 11504-11507. In some embodiments, the antisense strand sequence lacks the sequence modifications, or has different or additional sequence modifications, but otherwise is similar to a sequence described herein.

[0245] In some embodiments, the antisense strand sequence comprises or consists of an antisense strand sequence of an antisense strand sequence of any one of the siRNAs disclosed in any of Tables 4-10, or an siRNA thereof having 1 or 2 nucleoside substitutions, additions, or deletions. In some embodiments, the antisense strand sequence comprises or consists of an antisense strand sequence of an antisense strand sequence of any one of the siRNAs disclosed in any of Tables 4-10. In some embodiments, the antisense strand sequence comprises or consists of a sequence at least 75% identical, at least 80% identical, at least 85% identical, at least 90% identical, or at least 95% identical to an antisense strand sequence of an siRNA in any of Tables 4-101.

[0246] In some embodiments, the antisense strand sequence comprises or consists of an antisense strand sequence of an antisense strand sequence of any one of the siRNAs disclosed in any of Tables 4-9, 14, 15, 17, or 18, or an siRNA thereof having 1 or 2 nucleoside substitutions, additions, or deletions. In some embodiments, the antisense strand sequence comprises or consists of an antisense strand sequence of any one of the siRNAs disclosed in any of Tables 4-9, 14, 15, 17, or 18. In some embodiments, the antisense strand sequence comprises or consists of an antisense strand sequence of any one of the siRNAs disclosed in any of Tables 4-9, 14, 15, 17, or 18 where a relative ANGPTL expression in the table is below 1, or a siRNA thereof having 1 or 2 nucleoside substitutions, additions, or deletions. In some embodiments, the antisense strand sequence comprises or consists of an antisense strand sequence of any one of the siRNAs disclosed in any of Tables 4-9, 14, 15, 17, or 18 where a relative ANGPTL expression in the table is below 1. In some embodiments, the antisense strand sequence comprises or consists of an antisense strand sequence of any one of the siRNAs disclosed in any of Tables 4-9, 14, 15, 17, or 18 where a relative ANGPTL expression of the siRNA in the table is below the expression of a negative control in the table, or an siRNA thereof having 1 or 2 nucleoside substitutions, additions, or deletions. In some embodiments, the antisense strand sequence comprises or consists of an antisense strand sequence of any one of the siRNAs disclosed in any of Tables 4-9, 14, 15, 17, or 18 where a relative ANGPTL expression of the siRNA in the table is below the expression of a negative control in the table. In some embodiments, the antisense strand sequence comprises or consists of an antisense strand sequence of any one of the siRNAs disclosed in any of Tables 4-9, 14, 15, 17, or 18 where a relative ANGPTL expression in the table is below 0.5, or an siRNA thereof having 1 or 2 nucleoside substitutions, additions, or deletions. In some embodiments, the antisense strand sequence comprises or consists of an antisense strand sequence of any one of the siRNAs disclosed in any of Tables 4-9, 14, 15, 17, or 18 where a relative ANGPTL expression in the table is below 0.5. In some embodiments, the antisense strand sequence comprises or consists of an antisense strand sequence of any one of the siRNAs disclosed in any of Tables 4-9, 14, 15, 17, or 18 where a relative ANGPTL expression in the table is below 0.25, or an siRNA thereof having 1 or 2 nucleoside substitutions, additions, or deletions. In some embodiments, the antisense strand sequence comprises or consists of an antisense strand sequence of any one of the siRNAs disclosed in any of Tables 4-9, 14, 15, 17, or 18 where a relative ANGPTL expression in the table is below 0.25. In some embodiments, the antisense strand sequence comprises or consists of an unmodified version of an antisense strand sequence of any one of the siRNAs disclosed in any of Tables 4-9, 14, 15, 17, or 18. In some embodiments, the antisense strand sequence comprises or consists of an siRNA with the antisense strand sequence of an antisense strand sequence of any one of the siRNAs disclosed in any of Tables 4-9, 14, 15, 17, or 18, but with one or more additional or different modifications, or with a different modification pattern. In some embodiments, the antisense strand sequence lacks the sequence modifications, or has different or additional sequence modifications, but otherwise is similar to a sequence described herein.

[0247] In some embodiments, the antisense strand sequence comprises or consists of an antisense strand sequence of any one of the siRNAs disclosed in Table 4, or an siRNA thereof having 1 or 2 nucleoside substitutions, additions, or deletions. In some embodiments, the antisense strand sequence comprises or consists of an antisense strand sequence of any one of the siRNAs disclosed in Table 4. In some embodiments, the antisense strand sequence comprises or consists of an antisense strand sequence of any one of the siRNAs disclosed in Table 4 where the relative ANGPTL expression in the table is below 1, or an siRNA thereof having 1 or 2 nucleoside substitutions, additions, or deletions. In some embodiments, the antisense strand sequence comprises or consists of an antisense strand sequence of any one of the siRNAs disclosed in Table 4 where the relative ANGPTL expression in the table is below 1. In some embodiments, the antisense strand sequence comprises or consists of an antisense strand sequence of any one of the siRNAs disclosed in Table 4 where the relative ANGPTL expression of the siRNA in the table is below the expression of the negative control siRNA in the table (e.g. below a relative expression level of 0.67), or an siRNA thereof having 1 or 2 nucleoside substitutions, additions, or deletions. In some embodiments, the antisense strand sequence comprises or consists of an antisense strand sequence of any one of the siRNAs disclosed in Table 4 where the relative ANGPTL expression of the siRNA in the table is below the expression of the negative control siRNA in the table (e.g. below a relative expression level of 0.67). In some embodiments, the antisense strand sequence comprises or consists of an antisense strand sequence of any one of the siRNAs disclosed in Table 4 where the relative ANGPTL expression in the table is below 0.5, or an siRNA thereof having 1 or 2 nucleoside substitutions, additions, or deletions. In some embodiments, the antisense strand sequence comprises or consists of an antisense strand sequence of any one of the siRNAs disclosed in Table 4 where the relative ANGPTL expression in the table is below 0.5. In some embodiments, the antisense strand sequence comprises or consists of an antisense strand sequence of any one of the siRNAs disclosed in Table 4 where the relative ANGPTL expression in the table is below 0.25, or an siRNA thereof having 1 or 2 nucleoside substitutions, additions, or deletions. In some embodiments, the antisense strand sequence comprises or consists of an antisense strand sequence of any one of the siRNAs disclosed in Table 4 where the relative ANGPTL expression in the table is below 0.25. In some embodiments, the antisense strand sequence comprises or consists of an unmodified version of an antisense strand sequence of any one of the siRNAs disclosed in Table 4. In some embodiments, the antisense strand sequence comprises or consists of an siRNA with the antisense strand sequence of an antisense strand sequence of any one of the siRNAs disclosed in Table 4, but with one or more additional or different modifications, or with a different modification pattern. In some embodiments, the antisense strand sequence lacks the sequence modifications, or has different or additional sequence modifications, but otherwise is similar to a sequence described herein.

[0248] In some embodiments, the antisense strand sequence is incorporated into an siRNA that downregulates ANGPTL7. In some embodiments, the antisense strand sequence comprises or consists of an antisense strand sequence of any one of SEQ ID NOs: 11214, 11215, 11216, 11217, 11218, 11219, 11220, 11221, 11222, 11223, 11224, 11225, 11226, 11229, 11230, 11233, 11236, 11238, 11239, 11241, 11242, 11243, 11244, 11245, 11246, 11247, 11248, 11249, 11250, 11252, 11253, 11254, 11255, 11256, 11259, 11260, 11263, 11264, 11265, 11266, 11267, 11268, 11269, 11270, 11271, 11272, 11273, 11274, 11275, 11276, 11277, 11278, 11279, 11280, 11281, 11282, 11283, 11284, 11285, 11286, 11287, 11288, 11289, 11290, 11291, 11292, 11293, 11294, 11295, 11296, 11297, 11298, 11300, 11301, 11302, 11303, 11304, 11305, 11306, 11307, 11308, 11309, 11311, 11313, 11315, 11316, 11318, 11319, 11320, 11321, 11323, 11324, 11325, 11327, 11328, 11330, 11331, 11332, 11446, 11449, 11504, 11505, 11506, 11507, or an siRNA thereof having 1 or 2 nucleoside substitutions, additions, or deletions. In some embodiments, the antisense strand sequence comprises or consists of an antisense strand sequence of any one of SEQ ID NOs: 11214, 11215, 11216, 11217, 11218, 11219, 11220, 11221, 11222, 11223, 11224, 11225, 11226, 11229, 11230, 11233, 11236, 11238, 11239, 11241, 11242, 11243, 11244, 11245, 11246, 11247, 11248, 11249, 11250, 11252, 11253, 11254, 11255, 11256, 11259, 11260, 11263, 11264, 11265, 11266, 11267, 11268, 11269, 11270, 11271, 11272, 11273, 11274, 11275, 11276, 11277, 11278, 11279, 11280, 11281, 11282, 11283, 11284, 11285, 11286, 11287, 11288, 11289, 11290, 11291, 11292, 11293, 11294, 11295, 11296, 11297, 11298, 11300, 11301, 11302, 11303, 11304, 11305, 11306, 11307, 11308, 11309, 11311, 11313, 11315, 11316, 11318, 11319, 11320, 11321, 11323, 11324, 11325, 11327, 11328, 11330, 11331, 11332, 11446, 11449, 11504, 11505, 11506, or 11507.

[0249] In some embodiments, the antisense strand sequence comprises or consists of an antisense strand sequence of any one of the siRNAs disclosed in Table 5, or an siRNA thereof having 1 or 2 nucleoside substitutions, additions, or deletions. In some embodiments, the antisense strand sequence comprises or consists of an antisense strand sequence of any one of the siRNAs disclosed in Table 5. In some embodiments, the antisense strand sequence comprises or consists of an antisense strand sequence of any one of the siRNAs disclosed in Table 5 where the relative ANGPTL expression in the table is below 1, or an siRNA thereof having 1 or 2 nucleoside substitutions, additions, or deletions. In some embodiments, the antisense strand sequence comprises or consists of an antisense strand sequence of any one of the siRNAs disclosed in Table 5 where the relative ANGPTL expression in the table is below 1. In some embodiments, the antisense strand sequence comprises or consists of an antisense strand sequence of any one of the siRNAs disclosed in Table 5 where the relative ANGPTL expression of the siRNA in the table is below the expression of the negative control siRNA in the table (e.g. below a relative expression level of 1.06), or an siRNA thereof having 1 or 2 nucleoside substitutions, additions, or deletions. In some embodiments, the antisense strand sequence comprises or consists of an antisense strand sequence of any one of the siRNAs disclosed in Table 5 where the relative ANGPTL expression of the siRNA in the table is below the expression of the negative control siRNA in the table (e.g. below a relative expression level of 1.06). In some embodiments, the antisense strand sequence comprises or consists of an antisense strand sequence of any one of the siRNAs disclosed in Table 5 where the relative ANGPTL expression in the table is below 0.5, or an siRNA thereof having 1 or 2 nucleoside substitutions, additions, or deletions. In some embodiments, the antisense strand sequence comprises or consists of an antisense strand sequence of any one of the siRNAs disclosed in Table 5 where the relative ANGPTL expression in the table is below 0.5. In some embodiments, the antisense strand sequence comprises or consists of an antisense strand sequence of any one of the siRNAs disclosed in Table 5 where the relative ANGPTL expression in the table is below 0.25, or an siRNA thereof having 1 or 2 nucleoside substitutions, additions, or deletions. In some embodiments, the antisense strand sequence comprises or consists of an antisense strand sequence of any one of the siRNAs disclosed in Table 5 where the relative ANGPTL expression in the table is below 0.25. In some embodiments, the antisense strand sequence comprises or consists of an unmodified version of an antisense strand sequence of any one of the siRNAs disclosed in Table 5. In some embodiments, the antisense strand sequence comprises or consists of an siRNA with the antisense strand sequence of an antisense strand sequence of any one of the siRNAs disclosed in Table 5, but with one or more additional or different modifications, or with a different modification pattern. In some embodiments, the antisense strand sequence lacks the sequence modifications, or has different or additional sequence modifications, but otherwise is similar to a sequence described herein.

[0250] In some embodiments, the antisense strand sequence comprises or consists of an antisense strand sequence of any one of the siRNAs disclosed in Table 6, or an siRNA thereof having 1 or 2 nucleoside substitutions, additions, or deletions. In some embodiments, the antisense strand sequence comprises or consists of an antisense strand sequence of any one of the siRNAs disclosed in Table 6. In some embodiments, the antisense strand sequence comprises or consists of an antisense strand sequence of any one of the siRNAs disclosed in Table 6 where the relative ANGPTL expression at 1 nM in the table is below 1, or an siRNA thereof having 1 or 2 nucleoside substitutions, additions, or deletions. In some embodiments, the antisense strand sequence comprises or consists of an antisense strand sequence of any one of the siRNAs disclosed in Table 6 where the relative ANGPTL expression at 1 nM in the table is below 1. In some embodiments, the antisense strand sequence comprises or consists of an antisense strand sequence of any one of the siRNAs disclosed in Table 6 where the relative ANGPTL expression at 1 nM of the siRNA in the table is below the expression of the negative control siRNA in the table (e.g. below a relative expression level of 0.66), or an siRNA thereof having 1 or 2 nucleoside substitutions, additions, or deletions. In some embodiments, the antisense strand sequence comprises or consists of an antisense strand sequence of any one of the siRNAs disclosed in Table 6 where the relative ANGPTL expression at 1 nM of the siRNA in the table is below the expression of the negative control siRNA in the table (e.g. below a relative expression level of 0.66). In some embodiments, the antisense strand sequence comprises or consists of an antisense strand sequence of any one of the siRNAs disclosed in Table 6 where the relative ANGPTL expression at 1 nM in the table is below 0.5, or an siRNA thereof having 1 or 2 nucleoside substitutions, additions, or deletions. In some embodiments, the antisense strand sequence comprises or consists of an antisense strand sequence of any one of the siRNAs disclosed in Table 6 where the relative ANGPTL expression at 1 nM in the table is below 0.5 (e.g. an siRNA with the sequence of ETD00245, ETD00247, or ETD00252). In some embodiments, the antisense strand sequence comprises or consists of an antisense strand sequence of any one of the siRNAs disclosed in Table 6 where the relative ANGPTL expression at 10 nM in the table is below 1, or an siRNA thereof having 1 or 2 nucleoside substitutions, additions, or deletions. In some embodiments, the antisense strand sequence comprises or consists of an antisense strand sequence of any one of the siRNAs disclosed in Table 6 where the relative ANGPTL expression at 10 nM in the table is below 1. In some embodiments, the antisense strand sequence comprises or consists of an unmodified version of an antisense strand sequence of any one of the siRNAs disclosed in Table 6. In some embodiments, the antisense strand sequence comprises or consists of an siRNA with the antisense strand sequence of an antisense strand sequence of any one of the siRNAs disclosed in Table 6, but with one or more additional or different modifications, or with a different modification pattern. In some embodiments, the antisense strand sequence lacks the sequence modifications, or has different or additional sequence modifications, but otherwise is similar to a sequence described herein.

[0251] In some embodiments, the antisense strand sequence comprises or consists of an antisense strand sequence of any one of the siRNAs disclosed in Table 7, or an siRNA thereof having 1 or 2 nucleoside substitutions, additions, or deletions. In some embodiments, the antisense strand sequence comprises or consists of an antisense strand sequence of any one of the siRNAs disclosed in Table 7. In some embodiments, the antisense strand sequence comprises or consists of an antisense strand sequence of any one of the siRNAs disclosed in Table 8, or an siRNA thereof having 1 or 2 nucleoside substitutions, additions, or deletions. In some embodiments, the antisense strand sequence comprises or consists of an antisense strand sequence of any one of the siRNAs disclosed in Table 8. In some embodiments, the antisense strand sequence comprises or consists of an antisense strand sequence of any one of the siRNAs disclosed in Table 9, or an siRNA thereof having 1 or 2 nucleoside substitutions, additions, or deletions. In some embodiments, the antisense strand sequence comprises or consists of an antisense strand sequence of any one of the siRNAs disclosed in Table 9. In some embodiments, the antisense strand sequence lacks the sequence modifications, or has different or additional sequence modifications, but otherwise is similar to a sequence described herein.

[0252] In some embodiments, the antisense strand sequence comprises or consists of an antisense strand sequence of any one of the siRNAs disclosed in Table 10, or an siRNA thereof having 1 or 2 nucleoside substitutions, additions, or deletions. In some embodiments, the antisense strand sequence comprises or consists of an antisense strand sequence of any one of the siRNAs disclosed in Table 10. In some embodiments, the antisense strand sequence comprises or consists of an antisense strand sequence of any one of the siRNAs disclosed in Table 10 where the percent of the siRNA remaining at 4 hours in the table is at least 50%, or an siRNA thereof having 1 or 2 nucleoside substitutions, additions, or deletions. In some embodiments, the antisense strand sequence comprises or consists of an antisense strand sequence of any one of the siRNAs disclosed in Table 10 where the percent of the siRNA remaining at 4 hours in the table is at least 50%. In some embodiments, the antisense strand sequence comprises or consists of an antisense strand sequence of any one of the siRNAs disclosed in Table 10 where the percent of the siRNA remaining at 4 hours in the table is at least 75%, or an siRNA thereof having 1 or 2 nucleoside substitutions, additions, or deletions. In some embodiments, the antisense strand sequence comprises or consists of an antisense strand sequence of any one of the siRNAs disclosed in Table 10 where the percent of the siRNA remaining at 4 hours in the table is at least 75%. In some embodiments, the antisense strand sequence comprises or consists of an antisense strand sequence of any one of the siRNAs disclosed in Table 10 where the percent of the siRNA remaining at 24 hours in the table is at least 50%, or an siRNA thereof having 1 or 2 nucleoside substitutions, additions, or deletions. In some embodiments, the antisense strand sequence comprises or consists of an antisense strand sequence of any one of the siRNAs disclosed in Table 10 where the percent of the siRNA remaining at 24 hours in the table is at least 50%. In some embodiments, the antisense strand sequence comprises or consists of an antisense strand sequence of any one of the siRNAs disclosed in Table 10 where the percent of the siRNA remaining at 24 hours in the table is at least 75%, or an siRNA thereof having 1 or 2 nucleoside substitutions, additions, or deletions. In some embodiments, the antisense strand sequence comprises or consists of an antisense strand sequence of any one of the siRNAs disclosed in Table 10 where the percent of the siRNA remaining at 24 hours in the table is at least 75%. In some embodiments, the antisense strand sequence comprises or consists of an unmodified version of an antisense strand sequence of any one of the siRNAs disclosed in Table 10. In some embodiments, the antisense strand sequence comprises or consists of an siRNA with the antisense strand sequence of an antisense strand sequence of any one of the siRNAs disclosed in Table 10, but with one or more additional or different modifications, or with a different modification pattern. In some embodiments, the antisense strand sequence lacks the sequence modifications, or has different or additional sequence modifications, but otherwise is similar to a sequence described herein.

[0253] In some embodiments, the antisense strand sequence comprises or consists of an antisense strand sequence of any one of the siRNAs disclosed in Table 11, or an siRNA thereof having 1 or 2 nucleoside substitutions, additions, or deletions. In some embodiments, the antisense strand sequence comprises or consists of an antisense strand sequence of any one of the siRNAs disclosed in Table 11. In some embodiments, the antisense strand sequence comprises or consists of an antisense strand sequence of any one of the siRNAs disclosed in Table 12, or an siRNA thereof having 1 or 2 nucleoside substitutions, additions, or deletions. In some embodiments, the antisense strand sequence comprises or consists of an antisense strand sequence of any one of the siRNAs disclosed in Table 12. In some embodiments, the antisense strand sequence lacks the sequence modifications, or has different or additional sequence modifications, but otherwise is similar to a sequence described herein.

[0254] In some embodiments, the antisense strand sequence comprises or consists of the sequence of the antisense strand of siRNA ETD00269, or an siRNA thereof having 1 or 2 nucleoside substitutions, additions, or deletions. In some embodiments, the antisense strand sequence comprises or consists of the sequence of the antisense strand of siRNA ETD00269. In some embodiments, the antisense strand sequence comprises or consists of the sequence of the antisense strand of siRNA ETD00270, or an siRNA thereof having 1 or 2 nucleoside substitutions, additions, or deletions. In some embodiments, the antisense strand sequence comprises or consists of the sequence of the antisense strand of siRNA ETD00270. In some embodiments, the antisense strand sequence comprises or consists of the sequence of the antisense strand of siRNA ETD00353, or an siRNA thereof having 1 or 2 nucleoside substitutions, additions, or deletions. In some embodiments, the antisense strand sequence comprises or consists of the sequence of the antisense strand of siRNA ETD00353. In some embodiments, the antisense strand sequence comprises or consists of the sequence of the antisense strand of siRNA ETD00356, or an siRNA thereof having 1 or 2 nucleoside substitutions, additions, or deletions. In some embodiments, the antisense strand sequence comprises or consists of the sequence of the antisense strand of siRNA ETD00356. In some embodiments, the antisense strand sequence comprises or consists of the sequence of the antisense strand of siRNA ETD00358, or an siRNA thereof having 1 or 2 nucleoside substitutions, additions, or deletions. In some embodiments, the antisense strand sequence comprises or consists of the sequence of the antisense strand of siRNA ETD00358. In some embodiments, the antisense strand sequence comprises or consists of the sequence of the antisense strand of siRNA ETD00370, or an siRNA thereof having 1 or 2 nucleoside substitutions, additions, or deletions. In some embodiments, the antisense strand sequence comprises or consists of the sequence of the antisense strand of siRNA ETD00370. In some embodiments, the antisense strand sequence comprises or consists of the sequence of the antisense strand of siRNA ETD00377, or an siRNA thereof having 1 or 2 nucleoside substitutions, additions, or deletions. In some embodiments, the antisense strand sequence comprises or consists of the sequence of the antisense strand of siRNA ETD00377. In some embodiments, the antisense strand sequence comprises or consists of the sequence of the antisense strand of siRNA ETD00378, or an siRNA thereof having 1 or 2 nucleoside substitutions, additions, or deletions. In some embodiments, the antisense strand sequence comprises or consists of the sequence of the antisense strand of siRNA ETD00378. In some embodiments, the antisense strand sequence comprises or consists of the sequence of the antisense strand of siRNA ETD00382, or an siRNA thereof having 1 or 2 nucleoside substitutions, additions, or deletions. In some embodiments, the antisense strand sequence comprises or consists of the sequence of the antisense strand of siRNA ETD00382. In some embodiments, the antisense strand sequence comprises or consists of the sequence of the antisense strand of siRNA ETD00752, or an siRNA thereof having 1 or 2 nucleoside substitutions, additions, or deletions. In some embodiments, the antisense strand sequence comprises or consists of the sequence of the antisense strand of siRNA ETD00752. In some embodiments, the antisense strand sequence comprises or consists of the sequence of SEQ ID NO: 11379, or an siRNA thereof having 1 or 2 nucleoside substitutions, additions, or deletions. In some embodiments, the antisense strand sequence comprises or consists of the sequence of SEQ ID NO: 11379. In some embodiments, the antisense strand sequence lacks the sequence modifications, or has different or additional sequence modifications, but otherwise is similar to a sequence described herein.

[0255] In some embodiments, the antisense strand sequence comprises or consists of the sequence of the antisense strand of siRNA ETD00752, or an siRNA thereof having 1 or 2 nucleoside substitutions, additions, or deletions. In some embodiments, the antisense strand sequence comprises or consists of the sequence of the antisense strand of siRNA ETD00752. In some embodiments, the antisense strand sequence comprises or consists of the sequence of the antisense strand of siRNA ETD01040, or an siRNA thereof having 1 or 2 nucleoside substitutions, additions, or deletions. In some embodiments, the antisense strand sequence comprises or consists of the sequence of the antisense strand of siRNA ETD01040. In some embodiments, the antisense strand sequence comprises or consists of the sequence of the antisense strand of siRNA ETD01043, or an siRNA thereof having 1 or 2 nucleoside substitutions, additions, or deletions. In some embodiments, the antisense strand sequence comprises or consists of the sequence of the antisense strand of siRNA ETD01043. In some embodiments, the antisense strand sequence comprises or consists of the sequence of SEQ ID NO: 11306, or an siRNA thereof having 1 or 2 nucleoside substitutions, additions, or deletions. In some embodiments, the antisense strand sequence comprises or consists of the sequence of SEQ ID NO: 11306. In some embodiments, the antisense strand sequence comprises or consists of the sequence of SEQ ID NO: 11446, or an siRNA thereof having 1 or 2 nucleoside substitutions, additions, or deletions. In some embodiments, the antisense strand sequence comprises or consists of the sequence of SEQ ID NO: 11446. In some embodiments, the antisense strand sequence comprises or consists of the sequence of SEQ ID NO: 11449, or an siRNA thereof having 1 or 2 nucleoside substitutions, additions, or deletions. In some embodiments, the antisense strand sequence comprises or consists of the sequence of SEQ ID NO: 11449. In some embodiments, the antisense strand sequence comprises or consists of the sequence of SEQ ID NO: 11504, or an siRNA thereof having 1 or 2 nucleoside substitutions, additions, or deletions. In some embodiments, the antisense strand sequence comprises or consists of the sequence of SEQ ID NO: 11504. In some embodiments, the antisense strand sequence comprises or consists of the sequence of SEQ ID NO: 11505, or an siRNA thereof having 1 or 2 nucleoside substitutions, additions, or deletions. In some embodiments, the antisense strand sequence comprises or consists of the sequence of SEQ ID NO: 11505. In some embodiments, the antisense strand sequence comprises or consists of the sequence of SEQ ID NO: 11506, or an siRNA thereof having 1 or 2 nucleoside substitutions, additions, or deletions. In some embodiments, the antisense strand sequence comprises or consists of the sequence of SEQ ID NO: 11506. In some embodiments, the antisense strand sequence comprises or consists of the sequence of SEQ ID NO: 11507, or an siRNA thereof having 1 or 2 nucleoside substitutions, additions, or deletions. In some embodiments, the antisense strand sequence comprises or consists of the sequence of SEQ ID NO: 11507. In some embodiments, the antisense strand sequence lacks the sequence modifications, or has different or additional sequence modifications, but otherwise is similar to a sequence described herein.

[0256] In some embodiments, the siRNA a sense strand comprising the sequence of SEQ ID NO: 11500, or a nucleic acid sequence thereof having 3 or 4 nucleoside substitutions, additions, or deletions. In some embodiments, the siRNA a sense strand comprising the sequence of SEQ ID NO: 11500, or a nucleic acid sequence thereof having 1 or 2 nucleoside substitutions, additions, or deletions. In some embodiments, the siRNA a sense strand comprising the sequence of SEQ ID NO: 11500. In some embodiments, the sense strand comprises one or more internucleoside linkage or nucleoside modifications.

[0257] In some embodiments, the siRNA a sense strand comprising the sequence of SEQ ID NO: 11545, or a nucleic acid sequence thereof having 3 or 4 nucleoside substitutions, additions, or deletions. In some embodiments, the siRNA a sense strand comprising the sequence of SEQ ID NO: 11545, or a nucleic acid sequence thereof having 1 or 2 nucleoside substitutions, additions, or deletions. In some embodiments, the siRNA a sense strand comprising the sequence of SEQ ID NO: 11545. In some embodiments, the sense strand comprises one or more internucleoside linkage or nucleoside modifications.

[0258] In some embodiments, the siRNA a sense strand comprising the sequence of SEQ ID NO: 11546, or a nucleic acid sequence thereof having 3 or 4 nucleoside substitutions, additions, or deletions. In some embodiments, the siRNA a sense strand comprising the sequence of SEQ ID NO: 11546, or a nucleic acid sequence thereof having 1 or 2 nucleoside substitutions, additions, or deletions. In some embodiments, the siRNA a sense strand comprising the sequence of SEQ ID NO: 11546. In some embodiments, the sense strand comprises one or more internucleoside linkage or nucleoside modifications.

[0259] In some embodiments, the siRNA an antisense strand comprising the sequence of SEQ ID NO: 11306, or a nucleic acid sequence thereof having 3 or 4 nucleoside substitutions, additions, or deletions. In some embodiments, the siRNA an antisense strand comprising the sequence of SEQ ID NO: 11306, or a nucleic acid sequence thereof having 1 or 2 nucleoside substitutions, additions, or deletions. In some embodiments, the siRNA an antisense strand comprising the sequence of SEQ ID NO: 11306. In some embodiments, the antisense strand comprises one or more internucleoside linkage or nucleoside modifications.

[0260] In some embodiments, the siRNA an antisense strand comprising the sequence of SEQ ID NO: 11547, or a nucleic acid sequence thereof having 3 or 4 nucleoside substitutions, additions, or deletions. In some embodiments, the siRNA an antisense strand comprising the sequence of SEQ ID NO: 11547, or a nucleic acid sequence thereof having 1 or 2 nucleoside substitutions, additions, or deletions. In some embodiments, the siRNA an antisense strand comprising the sequence of SEQ ID NO: 11547. In some embodiments, the antisense strand comprises one or more internucleoside linkage or nucleoside modifications.

[0261] In some embodiments, the siRNA an antisense strand comprising the sequence of SEQ ID NO: 11548, or a nucleic acid sequence thereof having 3 or 4 nucleoside substitutions, additions, or deletions. In some embodiments, the siRNA an antisense strand comprising the sequence of SEQ ID NO: 11548, or a nucleic acid sequence thereof having 1 or 2 nucleoside substitutions, additions, or deletions. In some embodiments, the siRNA an antisense strand comprising the sequence of SEQ ID NO: 11548. In some embodiments, the antisense strand comprises one or more internucleoside linkage or nucleoside modifications.

[0262] Ligands

[0263] A wide variety of entities can be coupled to the oligonucleotides described herein. In some embodiments, the entities are ligands, which are coupled, e.g., covalently, either directly or indirectly via an intervening tether. In some embodiments, a ligand is coupled to a dsRNA agent.

[0264] In some embodiments, a ligand alters the distribution, targeting or lifetime of the molecule into which it is incorporated. In some embodiments a ligand provides an enhanced affinity for a selected target, e.g., molecule, cell or cell type, compartment, receptor e.g., a cellular or organ compartment, tissue, organ or region of the body, as, e.g., compared to a species absent such a ligand. Ligands providing enhanced affinity for a selected target are also termed targeting ligands. These moieties or conjugates can include conjugate groups covalently bound to functional groups such as primary or secondary hydroxyl groups. Conjugate groups include intercalators, reporter molecules, polyamines, polyamides, polyethylene glycols, polyethers, groups that enhance the pharmacodynamic properties of oligomers, and groups that enhance the pharmacokinetic properties of oligomers. Typical conjugate groups include cholesterols, lipids, phospholipids, biotin, phenazine, folate, phenanthridine, anthraquinone, acridine, fluoresceins, rhc«Jamines, coumarins, and dyes. Groups that enhance the pharmacodynamic properties include groups that improve uptake, enhance resistance to degradation, and or strengthen sequence-specific hybridization with the target nucleic acid. Groups that enhance the pharmacokinetic properties include groups that improve uptake, distribution, metabolism or excretion of the compounds herein. Conjugate moieties include, but are not limited to, lipid moieties such as a cholesterol moiety, cholic acid, a thioether, e.g., hexyl-5-tritylthiol, a thiocholesterol, an aliphatic chain, e.g., dodecandiol or undecyl residues, a phospholipid, e.g., di-hexadecyl-rac-glycerol or triethylammonium1,2-di-O-hexadecyl-rac-glycero-3-Hphosphonate, a polyamine or a polyethylene glycol chain, or Adamantane acetic acid, a palmityl moiety, or an octadecylamine or hexylamino-carbonyl-oxycholesterol moiety. Oligonucleotides may also be conjugated to active drug substances, for example, aspirin, warfarin, phenylbutazone, ibuprofen, suprofen, fenbufen, ketoprofen, (S)-(+)-pranoprofen, carprofen, dansylsarcosine, 2,3,5-triiodobenzoic acid, flufenamic acid, folinic acid, a benzolhiadiazide, chlorothiazide, a diazepine, indomethicin, a barbiturate, a cephalosporin, a sulfa drug, an antidiabetic, an antibacterial or an antibiotic.

[0265] Some ligands can have endosomolytic properties. The endosomolytic ligands promote the lysis of the endosome and/or transport of the composition, or its components, from the endosome to the cytoplasm of the cell. The endosomolytic ligand may be a polyanionic peptide or peptidomimetic which shows pH-dependent membrane activity and fusogenicity. In some embodiments, the endosomolytic ligand assumes its active conformation at endosomal pH. The “active” conformation is that conformation in which the endosomolytic ligand promotes lysis of the endosome and/or transport of the composition, or its components, from the endosome to the cytoplasm of the cell. Exemplary endosomolytic ligands include the GALA peptide, the EALA peptide, and their derivatives. In some embodiments, the endosomolytic component may contain a chemical group (e.g., an amino acid) which will undergo a change in charge or protonation in response to a change in pH. The endosomolytic component may be linear or branched. Ligands can improve transport, hybridization, and specificity properties and may also improve nuclease resistance of the resultant natural or modified oligoribonucleotide, or a polymeric molecule comprising any combination of monomers described herein and/or natural or modified ribonucleotides.

[0266] Ligands in general can include therapeutic modifiers, e.g., for enhancing uptake; diagnostic compounds or reporter groups e.g., for monitoring distribution; cross-linking agents; and nuclease-resistance conferring moieties. General examples include lipids, steroids, vitamins, sugars, proteins, peptides, polyamines, and peptide mimics.

[0267] Ligands can include a naturally occurring substance, such as a protein (e.g., human serum albumin (HSA), low-density lipoprotein (LDL), high-density lipoprotein (HDL), or globulin); a carbohydrate (e.g., a dextran, pullulan, chitin, chitosan, inulin, cyclodextrin or hyaluronic acid); or a lipid. The ligand may also be a recombinant or synthetic molecule, such as a synthetic polymer, e.g., a synthetic polyamino acid, an oligonucleotide (e.g. an aptamer). Examples of polyamino acids include polyamino acid is a polylysine (PLL), poly L-aspartic acid, poly L-glutamic acid, styrene-maleic acid anhydride copolymer, poly(L-lactide-co-glycolied) copolymer, divinyl ether-maleic anhydride copolymer, N-(2-hydroxypropyl)methacrylamide copolymer (HMPA), polyethylene glycol (PEG), polyvinyl alcohol (PVA), polyurethane, poly(2-ethylacryllic acid), N-isopropylacrylamide polymers, or polyphosphazine. Example of polyamines include: polyethylenimine, polylysine (PLL), spermine, spermidine, polyamine, pseudopeptide-polyamine, peptidomimetic polyamine, dendrimer polyamine, arginine, amidine, protamine, cationic lipid, cationic porphyrin, quaternary salt of a polyamine, or an alpha helical peptide.

[0268] Ligands can also include targeting groups, e.g., a cell or tissue targeting agent, e.g., a lectin, glycoprotein, lipid or protein, e.g., an antibody, that binds to a specified cell type such as a kidney cell. A targeting group can be a thyrotropin, melanotropin, lectin, glycoprotein, surfactant protein A, Mucin carbohydrate, multivalent lactose, multivalent galactose, N-acetyl-galactosamine, N-acetyl-gulucosamine multivalent mannose, multivalent fucose, glycosylated polyaminoacids, multivalent galactose, transferrin, bisphosphonate, polyglutamate, polyaspartate, a lipid, cholesterol, a steroid, bile acid, folate, vitamin B12, biotin, an arginine-glycine-aspartic acid (RGD) peptide, an RGD peptide mimetic or an aptamer.

[0269] Additional examples of ligands include dyes, intercalating agents (e.g. acridines), cross-linkers (e.g. psoralene, mitomycin C), porphyrins (TPPC4, texaphyrin, Sapphyrin), polycyclic aromatic hydrocarbons (e.g., phenazine, dihydrophenazine), artificial endonucleases or a chelator (e.g. EDTA), lipophilic molecules (e.g., cholesterol, cholic acid, adamantane acetic acid, 1-pyrene butyric acid, dihydrotestosterone, 1,3-Bis-O-(hexadecyl)glycerol, geranyloxyhexyl group, hexadecylglycerol, borneol, menthol, 1,3-propanediol, heptadecyl group, palmitic acid, myristic acid, 03-(oleoyl)lithocholic acid, 03-(oleoyl)cholenic acid, dimethoxytrityl, or phenoxazine), and peptide conjugates (e.g., antennapedia peptide, Tat peptide), alkylating agents, phosphate, amino, mercapto, PEG (e.g., PEG-40K), MPEG, [MPEG]2, polyamino, alkyl, substituted alkyl, radiolabeled markers, enzymes, haptens (e.g. biotin), transport/absorption facilitators (e.g., aspirin, vitamin E, folic acid), synthetic ribonucleases (e.g., imidazole, bisimidazole, histamine, imidazole clusters, acridine-imidazole conjugates, Eu3+ complexes of tetraazamacrocycles), dinitrophenyl, HRP, or AP.

[0270] Ligands can be proteins, e.g., glycoproteins, or peptides, e.g., molecules having a specific affinity for a co-ligand, or antibodies e.g., an antibody, that binds to a specified cell type such as a cancer cell, endothelial cell, or bone cell. Ligands may also include hormones and hormone receptors. They can also include non-peptidic species, such as lipids, lectins, carbohydrates, vitamins, cofactors, multivalent lactose, multivalent galactose, N-acetyl-galactosamine, N-acetyl-gulucosamine multivalent mannose, multivalent fucose, or aptamers. The ligand can be, for example, a lipopolysaccharide, an activator of p38 MAP kinase, or an activator of NF-KB.

[0271] The ligand can be a substance, e.g., a drug, which can increase the uptake of the siRNA agent into the cell, for example, by disrupting the cell's cytoskeleton, e.g., by disrupting the cell's microtubules, microfilaments, and/or intermediate filaments. The drug can be, for example, taxon, vincristine, vinblastine, cytochalasin, nocodazole, japlakinolide, latrunculin A, phalloidin, swinholide A, indanocine, or myoservin.

[0272] The ligand can increase the uptake of the oligonucleotide into the cell by activating an inflammatory response, for example. Exemplary ligands that would have such an effect include tumor necrosis factor alpha (TNF alpha), interleukin-1 beta, or gamma interferon.

[0273] In another aspect, the ligand is a moiety, e.g., a vitamin, which is taken up by a target cell, e.g., a proliferating cell. These are particularly useful for treating disorders characterized by unwanted cell proliferation, e.g., of the malignant or non-malignant type, e.g., cancer cells. Exemplary vitamins include vitamin A, E, and K. Other exemplary vitamins include B vitamins, e.g., folic acid, B12, riboflavin, biotin, pyridoxal or other vitamins or nutrients taken up by cancer cells. Also included are HAS, low density lipoprotein (LDL) and high-density lipoprotein (HDL). In another aspect, the ligand is a cell-permeation agent, e.g., a helical cell-permeation agent. In some cases, the agent is amphipathic. An exemplary agent is a peptide such as t at or antennopedia. If the agent is a peptide, it can be modified, including a peptidylmimetic, invertomers, non-peptide or pseudo-peptide linkages, and use of D-amino acids. The helical agent is may be an alpha-helical agent, which may have a lipophilic and a lipophobic phase.

[0274] The ligand can be a peptide or peptidomimetic. A peptidomimetic (also referred to herein as an oligopeptidomimetic) is a molecule capable of folding into a defined three-dimensional structure similar to a natural peptide. The peptide or peptidomimetic moiety can be about 3-50 amino acids long, e.g., about 3, 5, 10, 15, 20, 25, 30, 35, 40, 45, or 50 amino acids long. A peptide or peptidomimetic can be, for example, a cell permeation peptide, cationic peptide, amphipathic peptide, or hydrophobic peptide (e.g., consisting primarily of Tyr, Trp or Phe). The peptide moiety can be a dendrimer peptide, constrained peptide or crosslinked peptide. In some cases, the peptide moiety can include a hydrophobic membrane translocation sequence (MTS). An exemplary hydrophobic MTS-containing peptide is RFGF derived from human fibroblast growth factor 4 and having the amino acid sequence AAVALLPAVLLALLAP (SEQ ID NO: 11390), an RFGF analogue (e.g., amino acid sequence AALLPVLLAAP (SEQ ID NO: 11391) containing a hydrophobic MTS can also be a targeting moiety. The peptide moiety can be a “delivery” peptide, which can carry large polar molecules including peptides, oligonucleotides, and protein across cell membranes. For example, sequences from the HIV Tat protein (GRKKRRQRRRPPQ, SEQ ID NO: 11392) and the Drosophila Antennapedia protein (RQIKIWFQNRRMKWK, SEQ ID NO: 11393) are capable of functioning as delivery peptides. A peptide or peptidomimetic can be encoded by a random sequence of DNA, such as a peptide identified from a phage-display library, or one-bead-one-compound (OBOC) combinatorial library. In some cases, the peptide or peptidomimetic tethered to an siRNA agent via an incorporated monomer unit is a cell targeting peptide such as an arginine-glycine-aspartic acid (RGD)-peptide, or RGD mimic. A peptide moiety can range in length from about 3 amino acids to about 40 amino acids. The peptide moieties can have a structural modification, such as to increase stability or direct conformational properties. Any of the structural modifications described below can be utilized. An RGD peptide moiety can be used to target a tumor cell, such as an endothelial tumor cell or a breast cancer tumor cell. An RGD peptide can facilitate targeting of an siRNA agent to tumors of a variety of other tissues, including the lung, kidney, spleen, or liver. In some cases, the RGD peptide will facilitate targeting of an siRNA agent to the kidney. The RGD peptide may also be used to facilitate targeting of an siRNA agent to different cell types in the eye. RGD-binding integrins, such as the avb3 integrin pair, are expressed in trabecular meshwork, sclera, and ciliary body of the mouse anterior segment. The RGD peptide can be linear or cyclic, and can be modified, e.g., glycosylated or methylated to facilitate targeting to specific tissues. For example, a glycosylated RGD peptide can deliver an siRNA agent to a tumor cell expressing yB3. Peptides that target markers enriched in proliferating cells can be used. For example, RGD containing peptides and peptidomimetics can target cancer cells, in particular cells that exhibit an integrin. Thus, one could use RGD peptides, cyclic peptides containing RGD, RGD peptides that include D-amino acids, as well as synthetic RGD mimics. In addition to RGD, one can use other moieties that target the integrin ligand. Generally, such ligands can be used to control proliferating cells and angiogenesis. Exemplary conjugates of this type ligands that targets PECAM-1, VEGF, or other cancer gene, e.g., a cancer gene described herein. Cell binding ligands may be composed of multiple ligands (multivalency) to increase binding affinity. For example, more than one integrin-binding ligand may be combined. Without limiting the structures that bind to integrins, an example of a cyclic peptide RGD ligand is Cyclo(-Arg-Gly-Asp-D-Phe-Xaa) where Xaa is an amino acid with a sidechain that is amenable to conjugation. Naturally occurring examples of X include cysteine where a thiol is used for conjugation or lysine where an amine is used for conjugation. In addition, non-natural amino acids may have other functional groups such as alkynes, azides, or maleimides for conjugation.

[chemical structure]

[0275] An example of a noncyclic, peptidomimetic is an amino benzoic acid derivative where in X is a site of conjugation.

[chemical structure]

[0276] Some embodiments include an RGD ligand attached at either a 3′ terminus or a 5′ terminus. Some embodiments include an RGD ligand attached at a 3′ terminus and a 5′ terminus. In some embodiments, the RGD ligand comprises Cyclo(-Arg-Gly-Asp-D-Phe-Cys), Cyclo(-Arg-Gly-Asp-D-Phe-Lys), Cyclo(-Arg-Gly-Asp-D-Phe-azido), Cyclo(-Arg-Gly-Asp-D-Phe-alkynyl), amino benzoic acid-based RGD, or a combination thereof. In some embodiments, the RGD ligand is composed of 2, 3 or 4 RGD ligands. In some embodiments, the RGD is positioned on the sense strand. In some embodiments, the RGD is positioned at the 5′ end of the sense strand. In some embodiments, the RGD is positioned at the 3′ end of the sense strand. In some embodiments, the RGD is positioned on the antisense strand. In some embodiments, the RGD ligand is positioned at the 5′ end of the antisense strand. In some embodiments, the RGD ligand is positioned at the 3′ end of the antisense strand.

[0277] In some embodiments, a “cell permeation peptide” is capable of permeating a cell, e.g., a microbial cell, such as a bacterial or fungal cell, or a mammalian cell, such as a human cell. A microbial cell-permeating peptide can be, for example, an α-helical linear peptide (e.g., LL-37 or Ceropin PI), a disulfide bond-containing peptide (e.g., a-defensin, β-defensin or bactenecin), or a peptide containing only one or two dominating amino acids (e.g., PR-39 or indolicidin). A cell permeation peptide can also include a nuclear localization signal (NLS). For example, a cell permeation peptide can be a bipartite amphipathic peptide, such as MPG, which is derived from the fusion peptide domain of HIV-1 gp41 and the NLS of SV40 large T antigen.

[0278] In some embodiments, a targeting peptide can be an amphipathic a-helical peptide. Exemplary amphipathic α-helical peptides include, but are not limited to, cecropins, lycotoxins, paradaxins, buforin, CPF, bombinin-like peptide (BLP), cathelicidins, ceratotoxins, S. clava peptides, hagfish intestinal antimicrobial peptides (HFIAPs), magainines, brevinins-2, dermaseptins, melittins, pleurocidin, H2A peptides, Xenopus peptides, esculentinis-1, and caerins. A number of factors may be considered to maintain the integrity of helix stability. For example, a maximum number of helix stabilization residues will be utilized (e.g., leu, ala, or lys), and a minimum number of helix destabilization residues will be utilized (e.g., proline, or cyclic monomeric units. The capping residue will be considered (for example Gly is an exemplary N-capping residue and/or C-terminal amidation can be used to provide an extra H-bond to stabilize the helix. Formation of salt bridges between residues with opposite charges, separated by i±3, or i±4 positions can provide stability. For example, cationic residues such as lysine, arginine, homo-arginine, ornithine or histidine can form salt bridges with the anionic residues glutamate or aspartate.

[0279] Peptide and peptidomimetic ligands include those having naturally occurring or modified peptides, e.g., D or L peptides; α, β, or γ peptides; N-methyl peptides; azapeptides; peptides having one or more amide, i.e., peptide, linkages replaced with one or more urea, thiourea, carbamate, or sulfonyl urea linkages; or cyclic peptides.

[0280] The targeting ligand can be any ligand that is capable of targeting a specific receptor. Examples include, but are not limited to, folate, GalNAc, galactose, mannose, mannose-6P, clusters of sugars such as GalNAc cluster, mannose cluster, galactose cluster, or an aptamer. A cluster is a combination of two or more sugar units. The targeting ligands also include integrin receptor ligands, Chemokine receptor ligands, transferrin, biotin, serotonin receptor ligands, PSMA, endothelin, GCPII, somatostatin, LDL and HDL ligands. The ligands can also be based on nucleic acid, e.g., an aptamer. The aptamer can be unmodified or have any combination of modifications disclosed herein.

[0281] Endosomal release agents include imidazoles, poly or oligoimidazoles, PEIs, peptides, fusogenic peptides, polycarboxylates, polycations, masked oligo or poly cations or anions, acetals, polyacetals, ketals/polyketyals, orthoesters, polymers with masked or unmasked cationic or anionic charges, dendrimers with masked or unmasked cationic or anionic charges.

[0282] PK modulator stands for pharmacokinetic modulator. PK modulator include lipophiles, bile acids, steroids, phospholipid analogues, peptides, protein binding agents, PEG, vitamins etc. Exemplary PK modulator include, but are not limited to, cholesterol, fatty acids, cholic acid, lithocholic acid, dialkylglycerides, diacylglyceride, phospholipids, sphingo lipids, naproxen, ibuprofen, vitamin E, biotin etc. Oligonucleotides that comprise a number of phosphorothioate linkages are also known to bind to serum protein, thus short oligonucleotides, e.g. oligonucleotides of about 5 bases, 10 bases, 15 bases or 20 bases, comprising multiple of phosphorothioate linkages in the backbone are also amenable as ligands (e.g. as PK modulating ligands).

[0283] In addition, aptamers that bind serum components (e.g. serum proteins) are also amenable as PK modulating ligands.

[0284] When two or more ligands are present, the ligands can all have same properties, all have different properties or some ligands have the same properties while others have different properties. For example, a ligand can have targeting properties, have endosomolytic activity or have PK modulating properties. In some embodiments, all the ligands have different properties.

[0285] Ligands can be coupled to the oligonucleotides at various places, for example, 3′-end, 5′-end, and/or at an internal position. In some embodiments, the ligand is attached at a 2′ position. In some embodiments, the ligand is attached to the oligonucleotides via an intervening tether, e.g., a carrier described herein. The ligand or tethered ligand may be present on a monomer when said monomer is incorporated into the growing strand. In some embodiments, the ligand may be incorporated via coupling to a “precursor” monomer after said “precursor” monomer is incorporated into the growing strand. For example, a monomer having, e.g., an amino-terminated tether (i.e., having no associated ligand), e.g., TAP-(CH2)nNH2 may be incorporated into a growing oligonucleotide strand. In a subsequent operation, i.e., after incorporation of the precursor monomer into the strand, a ligand having an electrophilic group, e.g., a pentafluorophenyl ester or aldehyde group, can subsequently be attached to the precursor monomer by coupling the electrophilic group of the ligand with the terminal nucleophilic group of the precursor monomer's tether. In another example, a monomer having a chemical group suitable for taking part in Click Chemistry reaction may be incorporated e.g., an azide or alkyne terminated tether/linker. In a subsequent operation, i.e., after incorporation of the precursor monomer into the strand, a ligand having complementary chemical group, e.g. an alkyne or azide can be attached to the precursor monomer by coupling the alkyne and the azide together.

[0286] For double-stranded oligonucleotides, ligands can be attached to one or both strands. In some embodiments, a double-stranded siRNA agent contains a ligand conjugated to the sense strand. In some embodiments, a double-stranded siRNA agent contains a ligand conjugated to the antisense strand.

[0287] In some embodiments, ligand can be conjugated to nucleobases, sugar moieties, or internucleosidic linkages of nucleic acid molecules. Conjugation to purine nucleobases or derivatives thereof can occur at any position including, endocyclic and exocyclic atoms. In some embodiments, the 2-, 6-, 7-, or 8-positions of a purine nucleobase are attached to a conjugate moiety. Conjugation to pyrimidine nucleobases or derivatives thereof can also occur at any position. In some embodiments, the 2-, 5-, and 6-positions of a pyrimidine nucleobase can be substituted with a conjugate moiety. Conjugation to sugar moieties of nucleosides can occur at any carbon atom. Example carbon atoms of a sugar moiety that can be attached to a conjugate moiety include the 2′, 3′, and 5′ carbon atoms. The F position can also be attached to a conjugate moiety, such as in an abasic residue. Internucleosidic linkages can also bear conjugate moieties. For phosphorus-containing linkages (e.g., phosphodiester, phosphorothioate, phosphorodithiotate, phosphoroamidate, and the like), the conjugate moiety can be attached directly to the phosphorus atom or to an O, N, or S atom bound to the phosphorus atom. For amine- or amide-containing internucleosidic linkages (e.g., PNA), the conjugate moiety can be attached to the nitrogen atom of the amine or amide or to an adjacent carbon atom.

[0288] In some embodiments, the ligand is attached at a 5′ end of a nucleotide. In some embodiments, the ligand is attached at a 3′ end of a nucleotide, for example at a 3′ position of a ribose. In some embodiments, the ligand is attached at a 2′ position of a ribose or other nucleosidic sugar. In some embodiments, a combination of ligands are attached.

[0289] Any suitable ligand in the field of RNA interference may be used, although the ligand is typically a carbohydrate e.g. monosaccharide (such as GalNAc), disaccharide, trisaccharide, tetrasaccharide, polysaccharide. Linkers that conjugate the ligand to the nucleic acid include those discussed above. For example, the ligand can be one or more GalNAc (N-acetylglucosamine) derivatives attached through a bivalent or trivalent branched linker.

[0290] Cleavable Linking Groups

[0291] In some embodiments, an oligonucleotide compound or composition comprising an oligonucleotide compound comprises a cleavable linking group. In some cases, a dsRNA agent comprises or is connected to a cleavable linking group.

[0292] In some embodiments, a cleavable linking group is one which is sufficiently stable outside the cell, but which upon entry into a target cell is cleaved to release the two parts the linker is holding together. In some embodiments, the cleavable linking group is cleaved at least 10 times or more, or at least 100 times faster in the target cell or under a first reference condition (which can, e.g., be selected to mimic or represent intracellular conditions) than in the blood of a subject, or under a second reference condition (which can, e.g., be selected to mimic or represent conditions found in the blood or serum).

[0293] Cleavable linking groups are susceptible to cleavage agents, e.g., pH, redox potential or the presence of degradative agents. Generally, cleavage agents are more prevalent or found at higher levels or activities inside cells than in serum or blood.

[0294] Examples of such degradative agents include: redox agents which are selected for particular substrates or which have no substrate specificity, including, e.g., oxidative or reductive enzymes or reductive agents such as mercaptans, present in cells, that can degrade a redox cleavable linking group by reduction; esterases; endosomes or agents that can create an acidic environment, e.g., those that result in a pH of five or lower; enzymes that can hydrolyze or degrade an acid cleavable linking group by acting as a general acid, peptidases (which can be substrate specific), and phosphatases.

[0295] A cleavable linkage group, such as a disulfide bond can be susceptible to pH. The pH of human serum is 7.4, while the average intracellular pH is slightly lower, ranging from about 7.1-7.3. Endosomes have a more acidic pH, in the range of 5.5-6.0, and lysosomes have an even more acidic pH at around 5.0. Some linkers will have a cleavable linking group that is cleaved at a particular pH, thereby releasing the cationic lipid from the ligand inside the cell, or into the desired compartment of the cell.

[0296] A linker can include a cleavable linking group that is cleavable by a particular enzyme. The type of cleavable linking group incorporated into a linker can depend on the cell to be targeted. For example, liver targeting ligands can be linked to the cationic lipids through a linker that includes an ester group. Liver cells are rich in esterases, and therefore the linker will be cleaved more efficiently in liver cells than in cell types that are not esterase-rich. Other cell-types rich in esterases include cells of the lung, renal cortex, and testis.

[0297] Linkers that contain peptide bonds can be used when targeting cell types rich in peptidases, such as liver cells and synoviocytes. In general, the suitability of a candidate cleavable linking group can be evaluated by testing the ability of a degradative agent (or condition) to cleave the candidate linking group. It will also be desirable to also test the candidate cleavable linking group for the ability to resist cleavage in the blood or when in contact with other non-target tissue. Thus one can determine the relative susceptibility to cleavage between a first and a second condition, where the first is selected to be indicative of cleavage in a target cell and the second is selected to be indicative of cleavage in other tissues or biological fluids, e.g., blood or serum. The evaluations can be carried out in cell free systems, in cells, in cell culture, in organ or tissue culture, or in whole animals. It may be useful to make initial evaluations in cell-free or culture conditions and to confirm by further evaluations in whole animals. In some embodiments, useful candidate compounds are cleaved at least 2, 4, 10 or 100 times faster in the cell (or under in vitro conditions selected to mimic intracellular conditions) as compared to blood or serum (or under in vitro conditions selected to mimic extracellular conditions).

[0298] Redox Cleavable Linking Groups

[0299] One class of cleavable linking groups are redox cleavable linking groups that are cleaved upon reduction or oxidation. An example of reductively cleavable linking group is a disulfide linking group (—S—S—). To determine if a candidate cleavable linking group is a suitable “reductively cleavable linking group,” or for example is suitable for use with a particular oligonucleotide and particular targeting agent one can look to methods described herein. For example, a candidate can be evaluated by incubation with dithiothreitol (DTT), or other reducing agent using reagents know in the art, which mimic the rate of cleavage which would be observed in a cell, e.g., a target cell. The candidates can also be evaluated under conditions which are selected to mimic blood or serum conditions. In some embodiments, candidate compounds are cleaved by at most 10% in the blood. In some embodiments, useful candidate compounds are degraded at least 2, 4, 10 or 100 times faster in the cell (or under in vitro conditions selected to mimic intracellular conditions) as compared to blood (or under in vitro conditions selected to mimic extracellular conditions). The rate of cleavage of candidate compounds can be determined using standard enzyme kinetics assays under conditions chosen to mimic intracellular media and compared to conditions chosen to mimic extracellular media.

[0300] Phosphate-Based Cleavable Linking Groups

[0301] Phosphate-based cleavable linking groups are cleaved by agents that degrade or hydrolyze the phosphate group. An example of an agent that cleaves phosphate groups in cells are enzymes such as phosphatases in cells. Examples of phosphate-based linking groups are -OzP(O)(ORk)-O—, —O—P(S)(ORk)-O—, —O—P(S)(SRk)-O—, —S—P(O)(ORk)-O—, —O—P(O)(ORk)-S—, —S—P(O)(ORk)-S—, —O—P(S)(ORk)-S—, —S—P(S)(ORk)-O—, —O—P(O)(Rk)-O—, —O—P(S)(Rk)-O—, —S—P(O)(Rk)-O—, —S—P(S)(Rk)-O—, —S—P(O)(Rk)-S—, —O—P(S)(Rk)-S—. Some embodiments are —O—P(O)(OH)—O—, —O—P(S)(OH)—O—, —O—P(S)(SH)—O—, —S—P(O)(OH)—O—, —O—P(O)(OH)—S—, —S—P(O)(OH)—S—, —O—P(S)(OH)—S—, —S—P(S)(OH)—O—, —O—P(O)(H)—O—, —O—P(S)(H)—O—, —S—P(O)(H)—O—, —S—P(S)(H)—O—, —S—P(O)(H)—S—, —O—P(S)(H)—S—. An exemplary embodiment is —O—P(O)(OH)—O—. These candidates can be evaluated using methods analogous to those described above.

[0302] Acid Cleavable Linking Groups

[0303] Acid cleavable linking groups are linking groups that are cleaved under acidic conditions. In some embodiments acid cleavable linking groups are cleaved in an acidic environment with a pH of about 6.5 or lower (e.g., about 6.0, 5.5, 5.0, or lower), or by agents such as enzymes that can act as a general acid. In a cell, specific low pH organelles, such as endosomes and lysosomes can provide a cleaving environment for acid cleavable linking groups. Examples of acid cleavable linking groups include but are not limited to hydrazones, esters, and esters of amino acids. Acid cleavable groups can have the general formula —C═NN—C(O)O, or —OC(O). An exemplary embodiment is when the carbon attached to the oxygen of the ester (the alkoxy group) is an aryl group, substituted alkyl group, or tertiary alkyl group such as dimethyl pentyl or t-butyl. These candidates can be evaluated using methods analogous to those described above.

[0304] Ester-Based Linking Groups

[0305] Ester-based cleavable linking groups are cleaved by enzymes such as esterases and amidases in cells. Examples of ester-based cleavable linking groups include, but are not limited to, esters of alkylene, alkenylene and alkynylene groups. Ester cleavable linking groups have the general formula —C(O)O—, or —OC(O)—. These candidates can be evaluated using methods analogous to those described above.

[0306] Peptide-Based Cleaving Groups

[0307] Peptide-based cleavable linking groups are cleaved by enzymes such as peptidases and proteases in cells. Peptide-based cleavable linking groups are peptide bonds formed between amino acids to yield oligopeptides (e.g., dipeptides, tripeptides etc.) and polypeptides. Peptide-based cleavable groups do not include the amide group (—C(O)NH—). The amide group can be formed between any alkylene, alkenylene or alkynelene. A peptide bond is a special type of amide bond formed between amino acids to yield peptides and proteins. The peptide-based cleavage group is generally limited to the peptide bond (i.e., the amide bond) formed between amino acids yielding peptides and proteins and does not include the entire amide functional group. Peptide-based cleavable linking groups have the general formula —NHCHRAC(O)NHCHRBC(O)—, where RA and RB are the R groups of the two adjacent amino acids. These candidates can be evaluated using methods analogous to those described above. As used herein, “carbohydrate” refers to a compound which is either a carbohydrate per se made up of one or more monosaccharide units having at least 6 carbon atoms (which may be linear, branched or cyclic) with an oxygen, nitrogen or sulfur atom bonded to each carbon atom; or a compound having as a part thereof a carbohydrate moiety made up of one or more monosaccharide units each having at least six carbon atoms (which may be linear, branched or cyclic), with an oxygen, nitrogen or sulfur atom bonded to each carbon atom. Representative carbohydrates include the sugars (mono-, di-, tri- and oligosaccharides containing from about 4-9 monosaccharide units), and polysaccharides such as starches, glycogen, cellulose and polysaccharide gums. Specific monosaccharides include C5 and above (e.g., C5-C8) sugars; di- and trisaccharides include sugars having two or three monosaccharide units (e.g., C5-C8).

[0308] Nucleotide Mimics

[0309] In some embodiments, an oligonucleotide disclosed herein is a naked oligonucleotide. Naked oligonucleotides are defined as systems that contain no agents that are associated with the nucleic acid either covalently or non-covalently. The absence of any delivery vehicle may require that the oligonucleotide itself be sufficiently nuclease resistant, sufficiently long circulating and cell targeted. For small, solid-phase synthesized oligonucleotides such as those used in antisense oligonucleotides, RNAi, and innate immune stimulators, the use of nucleotide mimics may provide the required drug-like properties.

[0310] In some embodiments, an oligonucleotide of the present disclosure comprises nucleotides that replace phosphodiester group. The substitution of one non-bridging oxygen of a phosphodiester with a sulfur atom creates the phosphorothioate (PS) linkage. A PS bond creates a new stereocenter in the nucleotide and when synthesized under standard achiral conditions creates diastereomeric mixtures of Rp and Sp at the phosphorous atom.

[0311] There are other functional groups identified as replacements of the phosphodiester group in the oligonucleotide. Like phosphates and phosphorothioates, there are a variety of functional groups that are negatively charged such as phosphorodithioate (PS2) and thio-phosphoramidates. There are number of analogues that are uncharged such as phosphorodiamidate morpholino oligomer (PMO), peptide nucleic acid (PNA), phosphotriesters, and phosphonates. It is postulated that the uncharged analogues are not only nuclease resistant, but may also be more membrane permeable; however, the size and hydrophilicity of uncharged oligonucleotides still preclude their passive diffusion across membranes.

[0312] Morpholino oligos (PMOs) use a hydrolytically stable, uncharged phosphordiamidate functional group.

[0313] Peptide nucleic acids (PNAs) are—as their name suggests-based upon the amide functional group.

[0314] Enemas and intramuscular, intravitreal, intrathecal injections may be used for the administration of a variety of oligonucleotides with and without PS bonds.

[0315] In some embodiments, an oligonucleotide of the present disclosure comprises a nucleoside analogue that alters the structure of ribose. There are a variety of nucleotide mimics wherein the ribose or deoxyribose is modified to increase affinity for target and/or increase nuclease resistance. In some cases, there are modifications to all five positions of the ribose ring. In some cases, modifications are made to the 2′ position of ribose.

[0316] In some embodiments, an oligonucleotide of the present disclosure comprises a modification at the 1′ position. In some cases, the oligonucleotide comprises a cytidine mimic that is designed to have increased affinity for guanosine bases due to hydrogen bonding through an aminoethyl group. In some cases, the oligonucleotide comprises a C-5 propynyl pyrimidines.

[0317] In some embodiments, an oligonucleotide of the present disclosure comprises a 2′ modification. Modifications of the hydroxyl group at the 2′ position of ribose may be used to mimic the structure of the ribose ring while inhibiting ribonucleases that require the 2′-OH group for hydrolysis of RNA. In some cases, the oligonucleotide comprises a 2′-O-Methyl ribonucleic acid that is naturally occurring and may increase binding affinity to RNA itself while being resistant to ribonuclease. In some cases, the oligonucleotide comprises a 2′-O-Methyl group. In some cases, the oligonucleotide comprises a 2′-O-Methoxyethyl(MOE) modification, which may mimic the ribonuclease resistance of O-methyl, attenuate protein-oligonucleotide interactions and have increased affinity for RNA.

[0318] In some embodiments, an oligonucleotide of the present disclosure comprises a 2′-deoxy-2′-fluoro (2′-F) analogue of nucleosides that adopt a C3′-endo conformation characteristic of the sugars in RNA helices.

[0319] In some embodiments, an oligonucleotide of the present disclosure comprises 4′- and 5′-modifications, where alkoxy substituents at the 4′ position of 2′deoxyribose mimic the conformation of ribose.

[0320] In some embodiments, an oligonucleotide of the present disclosure comprises a bicyclic 2′-4′-modification. There are a variety of ribose derivatives that lock the carbohydrate ring into the 3′ endo conformation by the formation of bicyclic structures with a bridge between the 2′ oxygen and the 4′ position. The original bicyclic structure has a methylene bridging group and are termed locked nucleic acids (LNAs). The bicyclic structure “locks” the ribose into its preferred 3′ endo conformation and increases base pairing affinity. Incorporation of LNAs into a DNA duplex can increase melting points up to 8° C. per LNA. Subsequently, a variety of bicyclic nucleotides have been developed such as Bridged Nucleic Acids (BNAs), Ethyl-bridged (ENAs), constrained ethyl (cEt) nucleic acids and tricyclic structures with varying affinity for target sites. LNAs can be incorporated into antagomirs, splice blocking oligonucleotides, either strand of an RNAi duplex; however, like other 3′ endo conformers, LNAs are not substrates for RNAse H.

[0321] In some embodiments, an oligonucleotide of the present disclosure comprises an acyclic nucleic acid analog. In some cases, the analog comprises an alternative ribose ring structure. These include those in which the bond between 2′ and 3′ carbons in the ribose is absent, as well as those containing substitution of the ribose ring with a three-carbon backbone. Examples of acyclic nucleic acid analogs include unlocked nucleic acid (UNA) and glycol nucleic acids (GNA). Incorporation of these analogs reduce the melting temperature of the RNAi duplex and can be incorporated into either strand. Incorporation at the 5′ end of the sense strand, or passenger strand, inhibits incorporation into this strand into RISC. Incorporation into the seed region of the antisense strand, or guide strand, can reduce off-target activity. Acyclic nucleic acid analogs may also increase resistance of the RNAi duplex to 3′-exonuclease activity.

[0322] In some embodiments, an oligonucleotide of the present disclosure comprises modification patterns. Without being bound by theory, for RNAi duplexes, recognition by RISC requires RNA-like 3′-endo nucleotides and some patterns of RNA analogues. A pattern of alternating 2′-O-methyl groups may provide stability against nucleases, but not all permutations of alternating 2′-O-methyl are active RNAi agents. The fact that one may remove all 2′-hydroxy groups with alternating 2′-fluoro and 2′-O-methyl groups to produce duplexes that are resistant to nucleases and active in RNAi may suggest the 2′-hydroxy group is not absolutely required for activity, but that some sites in the RNAi duplex are sensitive to the added steric bulk of the methyl group.

[0323] Conjugated Oligonucleotides

[0324] Oligonucleotides may have groups conjugated via covalent bonds that prolong circulation, provide targeting to tissues and facilitate intracellular delivery.

[0325] In some embodiments, an oligonucleotide of the present disclosure is conjugated to polyethylene glycol (PEG), which may prevent clearance by two mechanisms: the increase in molecular weight above threshold for renal clearance and the prevention of non-specific interactions with extracellular surfaces and serum components. PEG may be incorporated into nucleic acid delivery vehicles by attachment to components that non-covalently associate with the nucleic acids, e.g., PEGylated lipids and polymers. PEG may also be directly conjugated to increase nucleic acid circulation times, decrease nonspecific interactions and alter biodistribution. In some cases, the targeting is passive and the potency of the nucleic may be compromised as PEG MW increases.

[0326] Another class of molecules that can be conjugated in order to increases circulation times is the attachment of lipophilic groups such as cholesterol or other lipophilic moiety with >12 carbons which interact with serum components such as albumen and lipoproteins thereby increasing circulation times and passive accumulation in the liver. In some cases, extensive PS modification increases circulation times through associations with serum components, with roughly 10 PS groups required for serum binding

[0327] Formulations, Compositions, and Delivery

[0328] In some embodiments, the dsRNA is administered in buffer.

[0329] In some embodiments, dsRNA agent (sometimes referred to as siRNA) compounds described herein can be formulated for administration to a subject. A formulated siRNA composition can assume a variety of states. In some examples, the composition is at least partially crystalline, uniformly crystalline, and/or anhydrous (e.g., less than 80, 50, 30, 20, or 10% water). In another example, the siRNA is in an aqueous phase, e.g., in a solution that includes water.

[0330] The aqueous phase or the crystalline compositions can, e.g., be incorporated into a delivery vehicle, e.g., a liposome (particularly for the aqueous phase) or a particle (e.g., a microparticle as can be appropriate for a crystalline composition). Generally, the siRNA composition is formulated in a manner that is compatible with the intended method of administration, as described herein. For example, in particular embodiments, the composition is prepared by at least one of the following methods: spray drying, lyophilization, vacuum drying, evaporation, fluid bed drying, or a combination of these techniques; or sonication with a lipid, freeze-drying, condensation and other self-assembly.

[0331] An siRNA preparation can be formulated in combination with another agent, e.g., another therapeutic agent or an agent that stabilizes an siRNA, e.g., a protein that complexes with siRNA to form an iRNP. Still other agents include chelators, e.g., EDTA (e.g., to remove divalent cations such as Mg2+), salts, RNAse inhibitors (e.g., a broad specificity RNAse inhibitor such as RNAsin) and so forth.

[0332] In some embodiments, the siRNA preparation includes another siRNA compound, e.g., a second siRNA that can mediate RNAi with respect to a second gene, or with respect to the same gene. Still other preparation can include at least 3, 5, ten, twenty, fifty, or a hundred or more different siRNA species. Such siRNAs can mediate RNAi with respect to a similar number of different genes.

[0333] In some embodiments, the siRNA preparation includes at least a second therapeutic agent (e.g., an agent other than a RNA or a DNA). For example, an siRNA composition for the treatment of a viral disease, e.g., HIV, might include a known antiviral agent (e.g., a protease inhibitor or reverse transcriptase inhibitor). In another example, a siRNA composition for the treatment of a cancer might further comprise a chemotherapeutic agent.

[0334] Liposomes

[0335] For ease of exposition the formulations, compositions and methods in this section are discussed largely with regard to unmodified siRNA compounds. It may be understood, however, that these formulations, compositions and methods can be practiced with other siRNA compounds, e.g., modified siRNAs. An siRNA compound, e.g., a double-stranded siRNA compound, or ssiRNA compound, (e.g., a precursor, e.g., a larger siRNA compound which can be processed into a ssiRNA compound, or a DNA which encodes an siRNA compound, e.g., a double-stranded siRNA compound, or ssiRNA compound, or precursor thereof) preparation can be formulated for delivery in a membranous molecular assembly, e.g., a liposome or a micelle. In some embodiments, the term “liposome” refers to a vesicle with amphiphilic lipids arranged in at least one bilayer, e.g., one bilayer or a plurality of bilayers. Liposomes include unilamellar and multilamellar vesicles that have a membrane formed from a lipophilic material and an aqueous interior. The aqueous portion contains the siRNA composition. The lipophilic material isolates the aqueous interior from an aqueous exterior, which typically does not include the siRNA composition, although in some examples, it may. Liposomes are useful for the transfer and delivery of active ingredients to the site of action. Because the liposomal membrane is structurally similar to biological membranes, when liposomes are applied to a tissue, the liposomal bilayer fuses with bilayer of the cellular membranes. As the merging of the liposome and cell progresses, the internal aqueous contents that include the siRNA are delivered into the cell where the siRNA can specifically bind to a target RNA. In some cases, the liposomes are also specifically targeted, e.g., to direct the siRNA to particular cell types.

[0336] A liposome containing an siRNA can be prepared by a variety of methods. In one example, the lipid component of a liposome is dissolved in a detergent so that micelles are formed with the lipid component. For example, the lipid component can be an amphipathic cationic lipid or lipid conjugate. The detergent can have a high critical micelle concentration and may be nonionic. Exemplary detergents include cholate, CHAPS, octylglucoside, deoxycholate, and lauroyl sarcosine. The siRNA preparation is then added to the micelles that include the lipid component. The cationic groups on the lipid interact with the siRNA and condense around the siRNA to form a liposome. After condensation, the detergent is removed, e.g., by dialysis, to yield a liposomal preparation of siRNA.

[0337] If necessary, a carrier compound that assists in condensation can be added during the condensation reaction, e.g., by controlled addition. For example, the carrier compound can be a polymer other than a nucleic acid {e.g., spermine or spermidine). pH can also be adjusted to favor condensation.

[0338] Commonly used techniques for preparing lipid aggregates of appropriate size for use as delivery vehicles include sonication and freeze-thaw plus extrusion. Microfluidization can be used when consistently small (50 to 200 nm) and relatively uniform aggregates are desired. These methods are readily adapted to packaging siRNA preparations into liposomes.

[0339] Liposomes that are pH-sensitive or negatively-charged entrap nucleic acid molecules rather than complex with them. Since both the nucleic acid molecules and the lipid are similarly charged, repulsion rather than complex formation occurs.

[0340] Nevertheless, some nucleic acid molecules are entrapped within the aqueous interior of these liposomes. pH-sensitive liposomes may be used to deliver DNA encoding the thymidine kinase gene to cell monolayers in culture where expression of the exogenous gene was detected in the target cells.

[0341] One type of liposomal composition includes phospholipids other than naturally-derived phosphatidylcholine. Neutral liposome compositions, for example, can be formed from dimyristoyl phosphatidylcholine (DMPC) or dipalmitoyl phosphatidylcholine (DPPC). Anionic liposome compositions generally are formed from dimyristoyl phosphatidylglycerol, while anionic fusogenic liposomes are formed primarily from dioleoyl phosphatidylethanolamine (DOPE). Another type of liposomal composition is formed from phosphatidylcholine (PC) such as, for example, soybean PC, and egg PC. Another type is formed from mixtures of phospholipid and/or phosphatidylcholine and/or cholesterol.

[0342] In some embodiments, cationic liposomes are used. Cationic liposomes possess the advantage of being able to fuse to the cell membrane. Non-cationic liposomes, although not able to fuse as efficiently with the plasma membrane, are taken up by macrophages in vivo and can be used to deliver siRNAs to macrophages.

[0343] Further advantages of liposomes include: liposomes obtained from natural phospholipids are biocompatible and biodegradable; liposomes can incorporate a wide range of water and lipid soluble drugs; liposomes can protect encapsulated siRNAs in their internal compartments from metabolism and degradation. Some considerations in the preparation of liposome formulations are the lipid surface charge, vesicle size and the aqueous volume of the liposomes.

[0344] A positively charged synthetic cationic lipid, N-[1-(2,3-dioleyloxy)propyl]-N,N,N-trimethylammonium chloride (DOTMA) can be used to form small liposomes that interact spontaneously with nucleic acid to form lipid-nucleic acid complexes which are capable of fusing with the negatively charged lipids of the cell membranes of tissue culture cells, resulting in delivery of siRNA.

[0345] A DOTMA analogue, 1,2-bis(oleoyloxy)-3-(trimethylammonia)propane (DOTAP) can be used in combination with a phospholipid to form DNA-complexing vesicles. Lipofectin™ Bethesda Research Laboratories, Gaithersburg, Md.) is an effective agent for the delivery of highly anionic nucleic acids into living tissue culture cells that comprise positively charged DOTMA liposomes which interact spontaneously with negatively charged polynucleotides to form complexes. When enough positively charged liposomes are used, the net charge on the resulting complexes is also positive. Positively charged complexes prepared in this way spontaneously attach to negatively charged cell surfaces, fuse with the plasma membrane, and efficiently deliver functional nucleic acids into, for example, tissue culture cells. Another commercially available cationic lipid, 1,2-bis(oleoyloxy)-3,3-(trimethylammonia)propane (“DOTAP”) (Boehringer Mannheim, Indianapolis, Indiana) differs from DOTMA in that the oleoyl moieties are linked by ester, rather than ether linkages.

[0346] Other reported cationic lipid compounds include those that conjugate to a variety of moieties including, for example, carboxyspermine which may be conjugated to one of two types of lipids and includes compounds such as 5-carboxyspermylglycine dioctaoleoylamide (“DOGS”) (Transfectam™, Promega, Madison, Wisconsin) and dipalmitoylphosphatidylethanolamine 5-carboxyspermyl-amide (“DPPES”).

[0347] Another cationic lipid conjugate includes derivatization of the lipid with cholesterol (“DC-Choi”) which may be formulated into liposomes in combination with DOPE. Lipopolylysine, made by conjugating polylysine to DOPE, may be effective for transfection in the presence of serum. For certain cell lines, these liposomes containing conjugated cationic lipids, are said to exhibit lower toxicity and provide more efficient transfection than the DOTMA-containing compositions. Other commercially available cationic lipid products include DMRIE and DMRIE-HP (Vical, La Jo 11a, California) and Lipofectamine (DOSPA) (Life Technology, Inc., Gaithersburg, Maryland).

[0348] Liposomal formulations may be particularly suited for topical administration, and may present an advantage over other formulations. Such advantages include reduced side effects related to high systemic absorption of the administered drug, increased accumulation of the administered drug at the desired target, and the ability to administer an siRNA into the skin. In some implementations, liposomes are used for delivering siRNA to epidermal cells and also to enhance the penetration of siRNA into dermal tissues, e.g., into skin. For example, the liposomes can be applied topically.

[0349] In some embodiments, non-ionic liposomal systems are used to deliver an oligonucleotide to the skin, e.g., using non-ionic surfactant and cholesterol. Non-ionic liposomal formulations comprising Novasome I (glyceryl dilaurate/cholesterol/polyoxyethylene-10-stearyl ether) and Novasome II (glyceryl distearate/cholesterol/polyoxyethylene-10-stearyl ether) may be used to deliver an oligonucleotide. Such formulations with siRNA are useful for treating a dermatological disorder.

[0350] Liposomes that include siRNA can be made highly deformable. Such deformability can enable the liposomes to penetrate through pore that are smaller than the average radius of the liposome. For example, transfersomes are a type of deformable liposomes. Transferosomes can be made by adding surface edge activators, usually surfactants, to a standard liposomal composition. Transfersomes that include siRNA can be delivered, for example, subcutaneously by infection in order to deliver siRNA to keratinocytes in the skin. In order to cross intact mammalian skin, lipid vesicles must pass through a series of fine pores, each with a diameter less than 50 nm, under the influence of a suitable transdermal gradient. In addition, due to the lipid properties, these transferosomes can be self-optimizing (adaptive to the shape of pores, e.g., in the skin), self-repairing, and can frequently reach their targets without fragmenting, and often self-loading.

[0351] In some embodiments, an oligonucleotide is formulated with a surfactant. Surfactants find wide application in formulations such as emulsions (including microemulsions) and liposomes (see above). In some embodiments, the siRNA is formulated as an emulsion that includes a surfactant. The most common way of classifying and ranking the properties of the many different types of surfactants, both natural and synthetic, is through the use of the hydrophile/lipophile balance (HLB). The nature of the hydrophilic group provides a useful means for categorizing the different surfactants used in formulations.

[0352] If the surfactant molecule is not ionized, it is classified as a nonionic surfactant. Nonionic surfactants find wide application in pharmaceutical products and are usable over a wide range of pH values. In general, their HLB values range from 2 to about 18 depending on their structure. Nonionic surfactants include nonionic esters such as ethylene glycol esters, propylene glycol esters, glyceryl esters, polyglyceryl esters, sorbitan esters, sucrose esters, and ethoxylated esters. Nonionic alkanolamides and ethers such as fatty alcohol ethoxylates, propoxylated alcohols, and ethoxylated/propoxylated block polymers are also included in this class. The polyoxy ethylene surfactants are the most popular members of the nonionic surfactant class.

[0353] If the surfactant molecule carries a negative charge when it is dissolved or dispersed in water, the surfactant is classified as anionic. Anionic surfactants include carboxylates such as soaps, acyl lactylates, acyl amides of amino acids, esters of sulfuric acid such as alkyl sulfates and ethoxylated alkyl sulfates, sulfonates such as alkyl benzene sulfonates, acyl isethionates, acyl taurates and sulfo succinates, and phosphates. The most important members of the anionic surfactant class are the alkyl sulfates and the soaps. If the surfactant molecule carries a positive charge when it is dissolved or dispersed in water, the surfactant is classified as cationic. Cationic surfactants include quaternary ammonium salts and ethoxylated amines. The quaternary ammonium salts are the most used members of this class.

[0354] If the surfactant molecule has the ability to carry either a positive or negative charge, the surfactant is classified as amphoteric. Amphoteric surfactants include acrylic acid derivatives, substituted alkylamides, N-alkylbetaines and phosphatides.

[0355] Micelles and Other Membranous Formulations

[0356] For ease of exposition the micelles and other formulations, compositions and methods in this section are discussed largely with regard to unmodified siRNA compounds. It may be understood, however, that these micelles and other formulations, compositions and methods can be practiced with other siRNA compounds, e.g., modified siRNA compounds. The siRNA compound, e.g., a double-stranded siRNA compound, or ssiRNA compound, (e.g., a precursor, e.g., a larger siRNA compound which can be processed into an ssiRNA compound, or a DNA which encodes an siRNA compound, e.g., a double-stranded siRNA compound, or ssiRNA compound, or precursor thereof) composition can be provided as a micellar formulation. In some embodiments, “micelles” are a particular type of molecular assembly in which amphipathic molecules are arranged in a spherical structure such that all the hydrophobic portions of the molecules are directed inward, leaving the hydrophilic portions in contact with the surrounding aqueous phase. The converse arrangement exists if the environment is hydrophobic.

[0357] A mixed micellar formulation suitable for delivery through transdermal membranes may be prepared by mixing an aqueous solution of the siRNA composition, an alkali metal Cs to C22 alkyl sulphate, and micelle forming compounds. Exemplary micelle forming compounds include lecithin, hyaluronic acid, pharmaceutically acceptable salts of hyaluronic acid, glycolic acid, lactic acid, chamomile extract, cucumber extract, oleic acid, linoleic acid, linolenic acid, monoolein, monooleates, monolaurates, borage oil, evening of primrose oil, menthol, trihydroxy oxo cholanyl glycine and pharmaceutically acceptable salts thereof, glycerin, polyglycerin, lysine, polylysine, triolein, polyoxy ethylene ethers and analogues thereof, polidocanol alkyl ethers and analogues thereof, chenodeoxycholate, deoxycholate, and mixtures thereof. The micelle forming compounds may be added at the same time or after addition of the alkali metal alkyl sulphate. Mixed micelles will form with substantially any kind of mixing of the ingredients but vigorous mixing in order to provide smaller size micelles.

[0358] In one method a first micellar composition is prepared which contains the siRNA composition and at least the alkali metal alkyl sulphate. The first micellar composition is then mixed with at least three micelle forming compounds to form a mixed micellar composition. In another method, the micellar composition is prepared by mixing the siRNA composition, the alkali metal alkyl sulphate and at least one of the micelle forming compounds, followed by addition of the remaining micelle forming compounds, with vigorous mixing.

[0359] Phenol and/or m-cresol may be added to the mixed micellar composition to stabilize the formulation and protect against bacterial growth. In some cases, phenol and/or m-cresol may be added with the micelle forming ingredients. An isotonic agent such as glycerin may also be added after formation of the mixed micellar composition.

[0360] For delivery of the micellar formulation as a spray, the formulation can be put into an aerosol dispenser and the dispenser is charged with a propellant. The propellant, which is under pressure, is in liquid form in the dispenser. The ratios of the ingredients are adjusted so that the aqueous and propellant phases become one, i.e., there is one phase. If there are two phases, it is necessary to mix or shake the dispenser prior to dispensing a portion of the contents, e.g., through a metered valve. The dispensed dose of pharmaceutical agent is propelled from the metered valve in a fine spray.

[0361] Propellants may include hydrogen-containing chlorofluorocarbons, hydrogen-containing fluorocarbons, dimethyl ether and diethyl ether. In certain embodiments, HFA 134a (1,1,1,2 tetrafluoroethane) may be used.

[0362] Pharmaceutical Compositions

[0363] In some embodiments, the composition is a pharmaceutical composition. In some embodiments, the composition is sterile. In some embodiments, the composition further comprises a pharmaceutically acceptable carrier.

[0364] In some embodiments, the pharmaceutically acceptable carrier comprises water. In some embodiments, the pharmaceutically acceptable carrier comprises a buffer. In some embodiments, the pharmaceutically acceptable carrier comprises a saline solution. In some embodiments, the pharmaceutically acceptable carrier comprises water, a buffer, or a saline solution. In some embodiments, the composition comprises a liposome. In some embodiments, the pharmaceutically acceptable carrier comprises liposomes, lipids, nanoparticles, proteins, protein-antibody complexes, peptides, cellulose, nanogel, or a combination thereof.

[0365] The oligonucleotides disclosed herein may be formulated in a pharmaceutical composition. The specific concentrations of the oligonucleotide can be determined by experimentation.

[0366] For ease of exposition the particles, formulations, compositions and methods in this section are discussed largely with regard to siRNA compounds. It may be understood, however, that these particles, formulations, compositions and methods can be practiced with modified siRNA compounds. In some embodiments, an siRNA compound, e.g., a double-stranded siRNA compound, or ssiRNA compound, (e.g., a precursor, e.g., a larger siRNA compound which can be processed into a ssiRNA compound, or a DNA which encodes an siRNA compound, e.g., a double-stranded siRNA compound, or ssiRNA compound, or precursor thereof) preparations may be incorporated into a particle, e.g., a microparticle. Microparticles can be produced by spray-drying but may also be produced by other methods including lyophilization, evaporation, fluid bed drying, vacuum drying, or a combination of these techniques.

[0367] The siRNA agents may be formulated for pharmaceutical use. Pharmaceutically acceptable compositions comprise a therapeutically-effective amount of one or more of the dsRNA agents in any of the preceding embodiments, taken alone or formulated together with one or more pharmaceutically acceptable carriers (additives), excipient and/or diluents.

[0368] The pharmaceutical compositions may be specially formulated for administration in solid or liquid form, including those adapted for the following: (1) oral administration, for example, drenches (aqueous or non-aqueous solutions or suspensions), tablets, e.g., those targeted for buccal, sublingual, and systemic absorption, boluses, powders, granules, pastes for application to the tongue; (2) parenteral administration, for example, by subcutaneous, intramuscular, intravenous or epidural injection as, for example, a sterile solution or suspension, or sustained-release formulation; (3) topical application, for example, as a cream, ointment, or a controlled-release patch or spray applied to the skin; (4) intravaginally or intrarectally, for example, as a pessary, cream or foam; (5) sublingually; (6) ocularly; (7) transdermally; (8) nasally; (9) inhalation; or (10) endotracheally.

[0369] In some embodiments, a “therapeutically-effective amount” is an amount of a compound, material, or composition comprising an oligonucleotide herein which is effective for producing some desired therapeutic effect in at least a sub-population of cells in an animal at a reasonable benefit/risk ratio applicable to any medical treatment.

[0370] In some embodiments, “pharmaceutically acceptable” is employed herein to refer to those compounds, materials, compositions, and/or dosage forms which are, within the scope of sound medical judgment, suitable for use in contact with the tissues of human beings and animals without excessive toxicity, irritation, allergic response, or other problem or complication, commensurate with a reasonable benefit/risk ratio.

[0371] In some embodiments, “pharmaceutically-acceptable carrier” as used herein means a pharmaceutically-acceptable material, composition or vehicle, such as a liquid or solid filler, diluent, excipient, manufacturing aid (e.g., lubricant, talc magnesium, calcium or zinc stearate, or steric acid), or solvent encapsulating material, involved in carrying or transporting the subject compound from one organ, or portion of the body, to another organ, or portion of the body. Each carrier must be “acceptable” in the sense of being compatible with the other ingredients of the formulation and not injurious to the patient. Some examples of materials which can serve as pharmaceutically-acceptable carriers include: (1) sugars, such as lactose, glucose and sucrose; (2) starches, such as corn starch and potato starch; (3) cellulose, and its derivatives, such as sodium carboxymethyl cellulose, ethyl cellulose and cellulose acetate; (4) powdered tragacanth; (5) malt; (6) gelatin; (7) lubricating agents, such as magnesium state, sodium lauryl sulfate and talc; (8) excipients, such as cocoa butter and suppository waxes; (9) oils, such as peanut oil, cottonseed oil, safflower oil, sesame oil, olive oil, corn oil and soybean oil; (10) glycols, such as propylene glycol; (11) polyols, such as glycerin, sorbitol, mannitol and polyethylene glycol; (12) esters, such as ethyl oleate and ethyl laurate; (13) agar; (14) buffering agents, such as magnesium hydroxide and aluminum hydroxide; (15) alginic acid; (16) pyrogen-free water; (17) isotonic saline; (18) Ringer's solution; (19) ethyl alcohol; (20) pH buffered solutions; (21) polyesters, polycarbonates and/or polyanhydrides; (22) bulking agents, such as polypeptides and amino acids (23) serum component, such as serum albumin, HDL and LDL; and (22) other non-toxic compatible substances employed in pharmaceutical formulations.

[0372] The formulations may conveniently be presented in unit dosage, or other relevant, form. The amount of active ingredient which can be combined with a carrier material to produce a single dosage form will vary depending upon the host being treated, the particular mode of administration. The amount of active ingredient which can be combined with a carrier material to produce a single dosage form will generally be that amount of the compound which produces a therapeutic effect. Generally, out of one hundred percent, this amount will range from about 0.1 percent to about ninety-nine percent of active ingredient, from about 5 percent to about 70 percent, or from about 10 percent to about 30 percent.

[0373] In certain embodiments, a formulation comprises an excipient selected from the group consisting of cyclodextrins, celluloses, liposomes, micelle forming agents, e.g., bile acids, and polymeric carriers, e.g., polyesters and polyanhydrides; and a compound disclosed herein. In certain embodiments, an aforementioned formulation renders orally bio available a compound disclosed herein.

[0374] An agent preparation can be formulated in combination with another agent, e.g., another therapeutic agent or an agent that stabilizes an siRNA, e.g., a protein that complexes with siRNA to form particle. Still other agents include chelators, e.g., EDTA (e.g., to remove divalent cations such as Mg2+), salts, RNAse inhibitors (e.g., a broad specificity RNAse inhibitor such as RNAsin) and so forth.

[0375] Methods of preparing these formulations or compositions include the step of bringing into association a compound disclosed herein with the carrier and, optionally, one or more accessory ingredients. In general, the formulations are prepared by uniformly and intimately bringing into association a compound disclosed herein with liquid carriers, or finely divided solid carriers, or both, and then, if necessary, shaping the product.

[0376] In some cases, in order to prolong the effect of a drug, it is desirable to slow the absorption of the drug from subcutaneous or intramuscular injection. This may be accomplished through the use of a liquid suspension of crystalline or amorphous material having poor water solubility. The rate of absorption of the drug then depends upon its rate of dissolution which, in turn, may depend upon crystal size and crystalline form. In some cases, delayed absorption of a parenterally-administered drug form is accomplished by dissolving or suspending the drug in an oil vehicle.

[0377] The compounds disclosed herein may be formulated for administration in any convenient way for use in human or veterinary medicine, by analogy with other pharmaceuticals.

[0378] Further provided are pharmaceutical compositions of the oligonucleotide molecules described. These pharmaceutical compositions include salts of the above compounds, e.g., acid addition salts, for example, salts of hydrochloric, hydrobromic, acetic acid, and benzene sulfonic acid. These pharmaceutical formulations or pharmaceutical compositions can comprise a pharmaceutically acceptable carrier or diluent.

[0379] In some embodiments, pharmaceutical compositions (e.g. oligonucleotides and/or lipid nanoparticle formulations thereof) further comprise conventional pharmaceutical excipients and/or additives. Suitable pharmaceutical excipients include preservatives, flavoring agents, stabilizers, antioxidants, osmolality adjusting agents, buffers, and pH adjusting agents. Suitable additives include physiologically biocompatible buffers (e.g., trimethylamine hydrochloride), addition of chelants (such as, for example, DTPA or DTPA-bisamide) or calcium chelate complexes (as for example calcium DTPA, CaNaDTPA-bisamide), or, optionally, additions of calcium or sodium salts (for example, calcium chloride, calcium ascorbate, calcium gluconate or calcium lactate). In addition, antioxidants and suspending agents can be used.

[0380] In some embodiments, the siRNA and LNP compositions and formulations provided herein for use in pulmonary delivery further comprise one or more surfactants. Suitable surfactants or surfactant components for enhancing the uptake of the compositions include synthetic and natural as well as full and truncated forms of surfactant protein A, surfactant protein B, surfactant protein C, surfactant protein D and surfactant Protein E, di-saturated phosphatidylcholine (other than dipalmitoyl), dipalmitoylphosphatidylcholine, phosphatidylcholine, phosphatidylglycerol, phosphatidylinositol, phosphatidylethanolamine, phosphatidylserine; phosphatidic acid, ubiquinones, lysophosphatidylethanolamine, lysophosphatidylcholine, palmitoyl-lysophosphatidylcholine, dehydroepiandrosterone, dolichols, sulfatidic acid, glycerol-3-phosphate, dihydroxyacetone phosphate, glycerol, glycero-3-phosphocholine, dihydroxyacetone, palmitate, cytidine diphosphate (CDP) diacylglycerol, CDP choline, choline, choline phosphate; as well as natural and artificial lamellar bodies which are the natural carrier vehicles for the components of surfactant, omega-3 fatty acids, polyenic acid, polyenoic acid, lecithin, palmitinic acid, non-ionic block copolymers of ethylene or propylene oxides, polyoxypropylene, monomeric and polymeric, polyoxyethylene, monomeric and polymeric, poly (vinyl amine) with dextran and/or alkanoyl side chains, Brij 35, Triton X-100 and synthetic surfactants ALEC, Exosurf, Survan and Atovaquone, among others. These surfactants can be used either as single or part of a multiple component surfactant in a formulation, or as covalently bound additions to the 5′ and/or 3′ ends of the nucleic acid component of a pharmaceutical composition herein.

[0381] Gene Therapy Vector

[0382] In some embodiments, double-stranded RNAi agents are produced in a cell in vivo, e.g., from exogenous DNA templates that are delivered into the cell. For example, the DNA templates can be inserted into vectors and used as gene therapy vectors. Gene therapy vectors can be delivered to a subject by, for example, intravenous injection, local administration, or by stereotactic injection. The pharmaceutical preparation of the gene therapy vector can include the gene therapy vector in an acceptable diluent, or can comprise a slow release matrix in which the gene delivery vehicle is imbedded. The DNA templates, for example, can include two transcription units, one that produces a transcript that includes the top strand of a dsRNA agent and one that produces a transcript that includes the bottom strand of a dsRNA agent. When the templates are transcribed, the dsRNA agent is produced, and processed into siRNA agent fragments that mediate gene silencing.

[0383] Delivery Vehicles Based Upon Complexation of Nucleic Acid

[0384] In some embodiments, complexation of oligonucleotide therapeutics with cationic agents inhibits nuclease from degrading the oligonucleotide by forming a steric barrier and by inhibiting nuclease binding by neutralizing anionic charge. The process of forming compact particles of nucleic acids from their extended chains is called condensation, which may be achieved by the addition of multiply-charged cationic species. Multiple positive charges can either be covalently attached to one another in a polycation or non-covalently associated with one another in a complex such as the surface of a cationic liposome. The resulting polycation-polyanion interaction is a colloidal dispersion where the nucleic acid particles vary in size and shape depending on the nucleic acid and the condensing cation. In general, the particles are greater than 20 nm in size, and—in the absence of agents to modulate surface charge such as polyethylene glycol (PEG)—have surface charges >20 mV.

[0385] The pharmacokinetics and biodistribution of nanoparticles are dependent upon their size and charge. Upon iv administration, large (>200 nm) and/or highly positively charged (surface charge >20 mV) are primarily distributed among endothelial tissues and macrophages in the liver and spleen and have a half-life of circulation less than 2 hours. Reduction in size (<100 nm) and surface charge (˜0 mV) results increased circulation times. Local administration of positively charged polyplexes results in association with cells at site of application such as epithelial cells.

[0386] Strategies for Cytoplasmic Delivery

[0387] There are a variety of strategies to facilitate cytoplasmic delivery of oligonucleotides including endosomal buffering (i.e. proton sponge), titratable amphiphiles, cell penetrating peptides and masked membrane lytic polymers.

[0388] The mechanism of endosomal buffering (i.e. proton sponge) to facilitate endosomolysis relies on the ability of agents such as polyamines to buffer endosomal/lysosomal compartments. The resistance to acidification is postulated to result in increased osmotic pressure that results in lysis of the lysosomal compartment. Titratable amphiphiles are polymers/peptides whose structure is pH-dependent in such a way that at acidic pH they are hydrophobic and membrane disruptive. Typically, titratable amphiphiles are polyanionic polymers or peptides with carboxylic acids that become neutral and membrane disruptive upon acidification. Cell penetrating peptides (CPPs) are cationic peptides, with a high propensity of guanidinium groups, that enter cells without any apparent membrane lysis. Masked lytic polymers are membrane disruptive polymers whose membrane interactivity is attenuated by reversible covalent modification. Like titratable amphiphiles, the mechanism of endosomolysis by masked polymers relies on the use of amphipathic polymers whose ability to lyse membranes is controlled such that the activity is only functional in the acidic environment of the endosome/lysosome. In the case of titratable amphiphiles, the mechanism of control is a reversible protonation of carboxylic acids. In the case of masked polymers, the control of membrane activity is the irreversible cleavage of a group that inhibits membrane interactivity of the polymer.

[0389] Liposomal Delivery Systems

[0390] Nucleic acids entrapped in lipids (lipoplexes) are a common vehicle for the delivery of nucleic acids. Cationic lipids form electrostatic complexes between nucleic acid and lipids. In addition to the cationic lipids, there are typically neutral or anionic helper lipids which include unsaturated fatty acids and are postulated to assist in fusion between the lipoplex and the cellular membrane, and PEGylated lipids, which prevent aggregation during formulation and storage and non-specific interactions in vivo.

[0391] Lipids are water insoluble and nucleic acids are organic solvent insoluble. To mix these components in a controlled manner such that formulations are repeatable and relatively homogenous in size, detergents or water-miscible organic solvents such as ethanol are used. After formation of electrostatically-associated complexes, the amphipathic detergent or solvent is then removed by dialysis or solvent exchange. Depending on the components and the mixing procedure is possible to formulate lipoplexes that are well less than 100 nm.

[0392] Although the transfection efficiencies of lipoplexes are difficult to predict and optimization is empirical, there are a few design features identified to aid transfection efficiency in vivo: pH-sensitive cationic lipids, the use of unsaturation in the lipid chains and the hydrophobic-hydrophilic balance of PEG-lipids to balance circulation times and transfection efficiencies.

[0393] There is a correlation between the pKa of the amine groups of the cationic lipid, which is buffer in the range of the endosomal/lysosomal pathway (pH 4-7), and transfection ability. To synthesize lipids with such pKa values, lipids commonly have closely-spaced amines or imidazole groups. The effect of these weakly basic amine groups in the lipoplexes produces several attractive attributes that facilitate in vivo transfection: reduced surface charge at neutral pH thereby decreasing nonspecific interactions in vivo, increased surface charge in acid environment of endosomes and lysosomes thereby increasing electrostatic interactions with the cellular membrane in these compartments and providing buffering groups that can provide endosomolytic activity via the proton sponge mechanism.

[0394] Another common motif observed in cationic and helper lipids used in lipoplexes is the presence of unsaturation in their component fatty acids with oleic (18 carbon chain with one double bond) and linoleic (18 carbons with 2 double bonds) being very common. The incorporation of these groups increases fluidity of membranes, aids in the formation of fusogenic lipid structures and facilitates the release of cationic lipids from nucleic acids.

[0395] PEG-conjugated lipids are incorporated into lipoplexes to aid in the formation of nonaggregating small complexes and for the prevention of nonspecific interactions in vivo. Due to the hydrophilicity of PEG, their lipid conjugates are not permanently associated with lipoplexes and diffuse from the complexes with dilution and interaction with amphiphilic components in vivo. This loss of PEG shielding from the surface of the lipoplexes aids in transfection efficiency. In general, longer saturated fatty acid chains increase circulation while unsaturation and shorter chains decrease circulation.

[0396] A commonly invoked tumor targeting mechanism is the Enhanced Permeability and Retention (EPR) effect, which is when nanoparticles accumulate in tumor tissue much more than they do in normal tissues due to the leaky disorganized vasculature associated with tumor tissues and their lack of lymphatic drainage. EPR-based targeting requires long circulating particles.

[0397] Polymer Based Delivery Vehicles

[0398] Like lipoplexes, polymer-based transfection vehicles (polyplexes) provide nuclease protection and condensation of larger nucleic acids. Polyplexes are based upon cationic polymers that form electrostatic complexes with anionic nucleic acids. Polycations may be purely synthetic (such as polyethyleneimine), naturally occurring (such as histones, protamine, spermine and spermidine) or synthetic polymers based upon cationic amino acids such as ornithine, lysine and arginine.

[0399] Polycations form electrostatic complexes with polyanionic nucleic acids. The strength of the association is dependent upon the size of the nucleic acid and the size and charge density of the polycation.

[0400] There are three common strategies to improve the stability and surface charge of polyplexes to improve the circulation and targeting of ability of polyplexes: crosslinking of polycation, addition of a synthetic polyanion and conjugation of PEG.

[0401] Crosslinking, also called lateral stabilization and caging, is the formation of covalent polyamine-polyamine bonds after complexation/condensation of the nucleic acid. The crosslinking is accomplished by the addition of bifunctional, amine-reactive reagents that form a 3-D network of bonds around the nucleic acid, thereby making the polyplex resistant to displacement by salts and polyelectrolytes. The stability of the polyplexes is such that the nucleic acid is no longer active unless a mechanism of reversibility is introduced to allow for release of the nucleic acid. A common way to introduce reversibility is the use of disulfide-containing crosslinking reagent that can be reduced in the cytoplasm allowing release of nucleic acid therapeutic.

[0402] A common method to reduce the surface charge of a polyplex is the conjugation of PEG, a method commonly known as steric stabilization. The resulting PEG modified polyplexes have prolonged circulation in vivo. PEG modifications can be added to the size chains of polyamines—either before or after polyplex formation- or at the end of the polymer as a block copolymer of PEG and polycation.

[0403] Crosslinking and PEGylation are often combined to make stabilized polyplexes of reduced surface charge for systemic administration that can either be passively or actively targeted. As observed for lipoplexes, a variety of small molecule (such as GalNAc, RGD and folate) and biologic targeting ligands (such as transferrin and antibodies) may be conjugated to PEG-modified polyplexes for tissues selective targeting.

[0404] The most commonly used polymer for polyplexes- and the originator of the proton sponge mechanism-is polyethylenimine (PEI). PEI's high density of amine groups endows it with high charge density and a continuum of amine pKa's that buffer in the entire pH range of the endosome. The buffering capacity of PEI may be mimicked by the addition of weakly basic imidazole groups.

[0405] Oligonucleotide vehicle formulation. The solution conditions in which the oligonucleotide is dissolved, or its delivery vehicle is dispersed may play a role in its delivery. Hypotonic and hypertonic solution conditions may aid in cytoplasmic delivery for systemic and locally administration.

[0406] Methods and Routes for Administration

[0407] In embodiments disclosed herein, the accumulation and/or expression of ANGPTL7 may be suppressed or inhibited by at least 10%. In embodiments disclosed herein, the ocular tissue cell is conjunctiva, sclera, trabecular meshwork (TM) or cornea. In certain embodiments, the ocular tissue is TM, such as human TM. In certain embodiments, the TM cell that is the subject may be located in vivo in a mammal.

[0408] Embodiments disclosed herein also provide a method of treating glaucoma in a patient in need thereof comprising administering to the patient an oligonucleotide in an amount sufficient to suppress accumulation of ANGPTL7 in an ocular tissue cell, wherein the RNA is a double-stranded molecule with a first strand of RNA that is a ribonucleotide sequence that corresponds to a nucleotide sequence encoding ANGPTL7 and a second strand of RNA that is a ribonucleotide sequence that is complementary to the nucleotide sequence encoding ANGPTL7, wherein the first and the second ribonucleotide strands are complementary strands that hybridize to each other to form the double-stranded molecule, and wherein the double-stranded molecule suppresses accumulation of ANGPTL7 in the ocular tissue cell. In certain embodiments, the ocular tissue cell may be conjunctiva, sclera, trabecular meshwork (TM) or cornea. In certain embodiments, the glaucoma is an open-angle glaucoma. In certain embodiments, the expression of ANGPTL7 or certain ANGPTL7 transcripts are inhibited by at least 10%.

[0409] Embodiments disclosed herein provide a method of making and identifying an isolated ANGPTL7-specific RNA that inhibits or modulates ANGPTL7 expression in a cell involving (a) generating an RNA that is a double-stranded molecule with a first strand of RNA that is a ribonucleotide sequence that corresponds to a nucleotide sequence encoding ANGPTL7 and a second strand of RNA that is a ribonucleotide sequence that is complementary to the nucleotide sequence encoding ANGPTL7, wherein the first and the second ribonucleotide strands are complementary strands that hybridize to each other to form the double-stranded molecule, and wherein the double-stranded molecule suppresses or modulates accumulation of ANGPTL7 or certain ANPTL7 transcripts in an ocular tissue cell; and (b) screening the RNA to determine whether the RNA inhibits or modulates ANGPTL7 expression in a cell. In certain embodiments, the ocular tissue cell is conjunctiva, sclera, trabecular meshwork (TM) or cornea. The ANGPTL7 transcripts may be inhibited or modulated by at least 10%, or may be inhibited or modulated by at least 50%, or may be inhibited or modulated by at least 80%. In certain embodiments, the RNA is introduced by topical administration.

[0410] Conditions mediated by ANGPTL7 activity include, but are not limited to glaucoma (including, for example, primary open-angle glaucoma, primary angle-closure glaucoma, normal-tension glaucoma, pigmentary glaucoma, exfoliation glaucoma, juvenile glaucoma, congenital glaucoma, inflammatory glaucoma, phacogenic glaucoma, glaucoma secondary to intraocular hemorrhage, traumatic glaucoma, neovascular glaucoma, drug-induced glaucoma, toxic glaucoma and absolute glaucoma), ocular hypertension, obesity, cancer, nevus sebaceous of Jadassohn, hepatitis C infection, osteoarthritis, keratoconus, fibrosis, hypoxia, abnormalities of lipid metabolism, oculocutaneous albinism, scleroderma, polymyositis, Crohn's disease, psoriasis, or rosacea. In some embodiments, the condition mediated by ANGPTL7 activity is an ocular condition. Ocular conditions include, but are not limited to, retinal artery occlusion, eyelid disease, panophthalmitis, ocular toxoplasmosis, angioid streaks, genetic eye tumor, retrobulbar hemorrhage, lacrimal gland adenoid cystic carcinoma, exfoliation syndrome, pharyngoconjunctival fever, takayasu arteritis, dry eye syndrome, macular holes, retinal vein occlusion, pterygium, vitreous body disease, ocular hypertension, retinopathy, cataract, ocular onchocerciasis, eye neoplasm, keratoconjunctivitis sicca, congenital nystagmus, genetic eye diseases, orbital myositis, glaucoma, optic neuritis, mixed cell uveal melanoma, uveitis, ocular tuberculosis, age-related macular degeneration, optic papillitis, eyelid neoplasm, ocular posterior capsular rupture, eye hemorrhage, eye injuries, ocular motility disease, corneal disease, acute retinal necrosis syndrome, eye infection, cycloplegia, microphthalmia, anterior uveitis, retinal drusen, diabetic eye disease, ocular foreign bodies, myopic macular degeneration, eye allergy, iritis, aniseikonia, retinal vasculitis, opsoclonus-myoclonus syndrome, ocular vascular disease, graves ophthalmopathy, lens disease, Sjogren syndrome, macular degeneration, or cytomegalovirus retinitis.

[0411] Routes of Delivery

[0412] A composition that includes a dsRNA agent can be delivered to a subject by a variety of routes. Exemplary routes include: intravenous, subcutaneous, topical, rectal, anal, vaginal, nasal, endotracheally, inhalation, pulmonary, ocular.

[0413] In one embodiment, a patient is prophylactically or therapeutically administered an agent that reduces or modulates the expression of ANGPTL7. The inventive method may prevent or delay an increase in intraocular pressure, may reduce associated nerve loss, may confer protection on retinal sensory cells, etc. Administration may be by any ocular route. One example is topical application, with the ANGPTL7 reducing agent administered in a formulation of eye drops, cream, ointment, gel, salve, etc. Another example is intraocular injection with the ANGPTL7 reducing agent administered subconjunctivally, intravitreally, retrobulbarly, within the crystalline lens via piercing the lens capsule. Another example provides the ANGPTL7 reducing or modulating agent to the eye on or in a formulation such as a liposome, microsphere, microcapsule, biocompatible matrix, gel, polymer, nanoparticle, nanocapsule, etc. Another example provides the ANGPTL7 reducing or modulating agent on or in a device such as a device for transscleral delivery, or another intraocular device using, for example, iontophoresis or another type of release mechanism (controlled or not controlled), as known by one skilled in the art. Another example provides the ANGPTL7 reducing or modulating agent in conjunction with gene therapy, as known by one skilled in the art.

[0414] The dsRNA agent can be incorporated into pharmaceutical compositions suitable for administration. Such compositions typically include one or more species of dsRNA agent and a pharmaceutically acceptable carrier. As used herein the language “pharmaceutically acceptable carrier” is intended to include any and all solvents, dispersion media, coatings, antibacterial and antifungal agents, isotonic and absorption delaying agents, and the like, compatible with pharmaceutical administration. The use of such media and agents for pharmaceutically active substances is well known in the art. Except insofar as any conventional media or agent is incompatible with the active compound, use thereof in the compositions is contemplated. Supplementary active compounds can also be incorporated into the compositions.

[0415] In embodiments, the pharmaceutical compositions described herein can be formulated for oral, parental, intramuscular, transdermal, intravenous, inter-arterial, nasal, vaginal, sublingual, and subungual. Further, the route also includes, but is not limited to auricular, buccal, conjunctival, cutaneous, dental, electro-osmosis, endocervical, endosinusial, endotracheal, enteral, epidural, extra-amniotic, extracorporeal, hemodialysis, infiltration, interstitial, intra-abdominal, intra-amniotic, intra-arterial, intra-articular, intrabiliary, intrachronchial, intrabursal, intracardiac, intracartilagenous, intracaudal, mtracavernous, intracavitary, intracerebral, intraci sternal, intracorneal, intracoronary, intracorporus cavernosum, intradermal, intradiscal, intraducatal, intraduodenal, intradural, intraepidermal, mtraesophageal, intragastric, intragingival, intraileal, intralesional, intralumical, intralymphatic, intramedullary, intrameningeal, intraocular, intraovarian, mtrapericardial, intraperitoneal, intrapleural, intrapulmonary, intrasinal, intrasynovial, intratendinous, intratesticular, intrathecal, intrathoracic, intratubular, intratumor, intratympanic, intrauterine, intravascular, intravenous bolus, intravenous drip, intraventricular, intravesical, intravitreal, iontophoresis, irrigation, laryngeal, nasal, nasogastric, occlusive dressing technique, ophthalmic, oropharyngeal, percutaneous, periarticular, peridural, periodontal, rectal, respirator}-, retrobulbar, soft tissue, subarachnoid, subconjunctival, subcutaneous, submucosal, topical, transmucosal, transplacental, transtracheal, transtympanic, ureteral, or urethal. In particular embodiments, the pharmaceutical compositions are formulated for intraocular administration, e.g., intravitreal, or topical. In some embodiments, the composition is formulated for intravitreal administration, e.g., intravitreal injection.

[0416] The route and site of administration may be chosen to enhance targeting. For example, to target muscle cells, intramuscular injection into the muscles of interest would be a logical choice. Lung cells might be targeted by administering the dsRNA agent in aerosol form.

[0417] Exemplary formulations for topical administration include those in which the dsRNAs are in admixture with a topical delivery agent such as lipids, liposomes, fatty acids, fatty acid esters, steroids, chelating agents and surfactants. Exemplary lipids and liposomes include neutral (e.g. dioleoyl-phosphatidyl DOPE etlianolaniine, dimyristoylphosphatidyl choline DMPC, distearolyphosphatidyl choline) negative (e.g. dimyristoylphosphatidyl glycerol DMPG) and cationic (e.g. dioleoyltetramemylaminopropyl DOTAP and dioleoyl-phosphatidyl ethanolamine DOTMA).

[0418] For topical or other administration, dsRNAs may be encapsulated within liposomes or may form complexes thereto, in particular to cationic liposomes. In some cases, dsRNAs may be complexed to lipids, in particular to cationic lipids.

[0419] A topical formulation may be administered by any ophthalmological vehicle, as known to one skilled in the art. Examples include, but are not limited to, eye droppers, satchels, applicators, etc. The amount and concentration of the formulation may depend upon the diluent, delivery system or device selected, clinical condition of the patient, side effects expected, stability of the compounds of the composition, presence and severity of other pathology, dosing frequency, active agent, etc.

[0420] Compositions and formulations for oral administration include powders or granules, microparticulates, nanoparticulates, suspensions or solutions in water or non-aqueous media, capsules, gel capsules, sachets, tablets or minitablets. Thickeners, flavoring agents, diluents, emulsifiers, dispersing aids or binders may be desirable. Exemplary surfactants include fatty acids and or esters or salts thereof, bile acids and/or salts thereof. In some cases, penetration enhancers, for example, fatty acids salts are combined with bile acids salts. An exemplary combination is the sodium salt of lauric acid, capric acid and UDCA. Further penetration enhancers include polyoxyethylene-9-lauryl ether and polyoxyethylene-20-cetyl ether. Oligonucleotides may be delivered orally, in granular form including sprayed dried particles, or complexed to form micro or nanoparticles.

[0421] Compositions and formulations for pulmonary administration may include sterile aqueous solutions that may also contain buffers, diluents and other suitable additives such as, but not limited to, penetration enhancers, carrier compounds and other pharmaceutically acceptable carriers or excipients.

[0422] Dosage

[0423] In one aspect, provided is a method of administering a dsRNA agent to a subject (e.g., a human subject). The method includes administering a unit dose of the dsRNA agent that is 14-30 nucleotides (nt) long, for example, 21-23 nt, and is complementary to a target RNA (e.g., ANGPTL7), and optionally includes at least one 3′ overhang 1-5 nucleotide long.

[0424] For topical administration, examples of concentrations that may be used include but are not limited to, less than 1 μg/mL, 1 μg/mL to 5 μg/mL, 5 μg/mL to 10 μg/mL, 10 μg/mL to 50 μg/mL, 50 μg/mL to 100 μg/mL, 100 μg/mL to 0.5 mg/mL, 0.5 mg/mL to 2.5 mg/mL, 1 mg/mL to 5 mg/mL, 5 mg/mL to 10 mg/mL, 10 mg/mL to 15 mg/mL, 15 mg/mL to 30 mg/mL, and greater than 30 mg/mL. For topical administration, examples of dosing regimens that may be used include but are not limited to, hourly, half-daily, daily, weekly, biweekly, monthly, quarterly, three times a year, twice a year, yearly, every two years, every three years, etc. Intervals between doses may be regular or varied. As one example, doses may be administered hourly or daily pre- and post-surgery for one week, for several weeks, or for several months, then may be administered twice a year or once a year until the desired reduction in intraocular pressure is achieved. As another example, doses may be administered daily or weekly pre- and/or post-surgery for one week, for several weeks, for several months, or for several years until the desired reduction in intraocular pressure achieved.

[0425] The defined amount can be an amount effective to treat or prevent a disease or disorder, e.g., a disease or disorder associated with the target RNA. The unit dose, for example, can be administered by injection (e.g., intravenous, subcutaneous or intramuscular), an inhaled dose, or a topical application. In some embodiments, dosages may be less than 10, 5, 2, 1, or 0.1 mg/kg of body weight.

[0426] In some embodiments, the unit dose is administered less frequently than once a day, e.g., less than every 2, 4, 8 or 30 days. In some embodiments, the unit dose is not administered with a frequency {e.g., not a regular frequency). For example, the unit dose may be administered a single time.

[0427] In some embodiments, the effective dose is administered with other traditional therapeutic modalities. For example, a therapeutic agent useful for treating a disease or disorder affecting the eye.

[0428] In some embodiments, a subject is administered an initial dose and one or more maintenance doses of a dsRNA agent. The maintenance dose or doses can be the same or lower than the initial dose, e.g., one-half less of the initial dose. A maintenance regimen can include treating the subject with a dose or doses ranging from 0.01 μg to 15 mg/kg of body weight per day, e.g., 10, 1, 0.1, 0.01, 0.001, or 0.00001 mg per kg of bodyweight per day. The maintenance doses are, for example, administered no more than once every 2, 5, 10, or 30 days. Further, the treatment regimen may last for a period of time which will vary depending upon the nature of the particular disease, its severity and the overall condition of the patient. In certain embodiments the dosage may be delivered no more than once per day, e.g., no more than once per 24, 36, 48, or more hours, e.g., no more than once for every 5 or 8 days.

[0429] Following treatment, the patient can be monitored for changes in his condition and for alleviation of the symptoms of the disease state. The dosage of the compound may either be increased in the event the patient does not respond significantly to current dosage levels, or the dose may be decreased if an alleviation of the symptoms of the disease state is observed, if the disease state is ablated, or if undesired side-effects are observed. The effective dose can be administered in a single dose or in two or more doses, as desired or considered appropriate under the specific circumstances. If desired to facilitate repeated or frequent infusions, implantation of a delivery device, e.g., a pump, semi-permanent stent (e.g., intravenous, intraperitoneal, intracisternal or intracapsular), or reservoir may be advisable.

[0430] The dsRNA agents can be administered to mammals, particularly large mammals such as nonhuman primates or humans in a number of ways.

[0431] In some embodiments, the administration of the dsRNA agent is parenteral, e.g., intravenous (e.g., as a bolus or as a diffusible infusion), intradermal, intraperitoneal, intramuscular, intrathecal, intraventricular, intracranial, subcutaneous, transmucosal, buccal, sublingual, endoscopic, rectal, oral, vaginal, topical, inhalation, pulmonary, intranasal, urethral or ocular. Administration can be provided by the subject or by another person, e.g., a health care provider. The medication can be provided in measured doses or in a dispenser which delivers a metered dose. Selected modes of delivery are discussed elsewhere herein.

[0432] Methods and Uses

[0433] Disclosed herein, in some embodiments, are methods of administering a composition described herein to a subject. Some embodiments relate to use a composition described herein, such as administering the composition to a subject. In some embodiments, the administration comprises an injection.

[0434] Some embodiments relate to a method of treating a disorder in a subject in need thereof. Some embodiments relate to use of a composition described herein in the method of treatment. Some embodiments include administering a composition described herein to a subject with the disorder. In some embodiments, the administration treats the disorder in the subject. In some embodiments, the composition treats the disorder in the subject.

[0435] In some embodiments, the treatment comprises prevention, inhibition, or reversion of the disorder in the subject. Some embodiments relate to use of a composition described herein in the method of preventing, inhibiting, or reversing the disorder. Some embodiments relate to a method of preventing, inhibiting, or reversing a disorder a disorder in a subject in need thereof. Some embodiments include administering a composition described herein to a subject with the disorder. In some embodiments, the administration prevents, inhibits, or reverses the disorder in the subject. In some embodiments, the composition prevents, inhibits, or reverses the disorder in the subject.

[0436] Some embodiments relate to a method of preventing a disorder a disorder in a subject in need thereof. Some embodiments relate to use of a composition described herein in the method of preventing the disorder. Some embodiments include administering a composition described herein to a subject with the disorder. In some embodiments, the administration prevents the disorder in the subject. In some embodiments, the composition prevents the disorder in the subject.

[0437] Some embodiments relate to a method of inhibiting a disorder a disorder in a subject in need thereof. Some embodiments relate to use of a composition described herein in the method of inhibiting the disorder. Some embodiments include administering a composition described herein to a subject with the disorder. In some embodiments, the administration inhibits the disorder in the subject. In some embodiments, the composition inhibits the disorder in the subject.

[0438] Some embodiments relate to a method of reversing a disorder a disorder in a subject in need thereof. Some embodiments relate to use of a composition described herein in the method of reversing the disorder. Some embodiments include administering a composition described herein to a subject with the disorder. In some embodiments, the administration reverses the disorder in the subject. In some embodiments, the composition reverses the disorder in the subject.

[0439] In some embodiments, the administration comprises an injection. In some embodiments, the administration is to an eye. In some embodiments, the administration is intravenous.

[0440] Disorders

[0441] Some embodiments of the methods described herein include treating a disorder in a subject in need thereof. In some embodiments, the disorder is or includes a disorder with high ANGPTL7 expression. In some embodiments, the disorder is an eye disorder. In some embodiments, the disorder comprises a disorder associated with high intraocular pressure. In some embodiments, the disorder is glaucoma. In some embodiments, the glaucoma is a glaucoma subtype. In some embodiments, the glaucoma subtype is non-specific glaucoma. In some embodiments, the glaucoma subtype is primary open angle glaucoma (POAG). In some embodiments, the glaucoma subtype is primary angle closure glaucoma (PACG). In some embodiments, the glaucoma includes a glaucoma symptom. In some embodiments, the glaucoma symptom includes an intraocular pressure measurement. In some embodiments, the glaucoma symptom includes need for a glaucoma surgery. In some embodiments, the glaucoma symptom includes need for a glaucoma medication.

[0442] Subjects

[0443] Some embodiments of the methods described herein include treatment of a subject. Examples of subjects include vertebrates, animals, mammals, dogs, cats, cattle, rodents, mice, rats, primates, monkeys, and humans. In some embodiments, the subject is a vertebrate. In some embodiments, the subject is an animal. In some embodiments, the subject is a mammal. In some embodiments, the subject is a dog. In some embodiments, the subject is a cat. In some embodiments, the subject is cattle. In some embodiments, the subject is a mouse. In some embodiments, the subject is a rat. In some embodiments, the subject is a primate. In some embodiments, the subject is a monkey. In some embodiments, the subject is an animal, a mammal, a dog, a cat, cattle, a rodent, a mouse, a rat, a primate, or a monkey. In some embodiments, the subject is a human.

[0444] The subject may have high intraocular pressure. For example, the subject may have an intraocular pressure that is higher than in a control subject such as normal healthy subject. The high intraocular pressure may include an increased intraocular pressure relative to a previous intraocular pressure in the same subject. The high intraocular pressure may be above 20 mmHg.

[0445] Baseline Measurements

[0446] Some embodiments of the methods described herein include obtaining a baseline measurement from a subject. For example, in some embodiments, a baseline measurement is obtained from the subject prior to treating the subject. In some embodiments, the baseline measurement comprises a baseline pressure measurement. In some embodiments, the baseline measurement is a baseline intraocular pressure measurement. In some embodiments, the baseline measurement is incidence of glaucoma. In some embodiments, the baseline measurement is incidence of a glaucoma subtype. In some embodiments, the baseline measurement is incidence of a glaucoma symptom.

[0447] In some embodiments, the baseline measurement is obtained by performing an assay such as an immunoassay, a colorimetric assay, or a fluorescence assay, on the sample obtained from the subject. In some embodiments, the baseline measurement is obtained by an immunoassay, a colorimetric assay, or a fluorescence assay. In some embodiments, the baseline measurement is obtained by PCR.

[0448] In some embodiments, the baseline measurement is a baseline ANGPTL7 protein measurement. In some embodiments, the baseline ANGPTL7 protein measurement comprises a baseline ANGPTL7 protein level. In some embodiments, the baseline ANGPTL7 protein level is indicated as a mass or percentage of ANGPTL7 protein per sample weight. In some embodiments, the baseline ANGPTL7 protein level is indicated as a mass or percentage of ANGPTL7 protein per sample volume. In some embodiments, the baseline ANGPTL7 protein level is indicated as a mass or percentage of ANGPTL7 protein per total protein within the sample. In some embodiments, the baseline ANGPTL7 protein measurement is a baseline circulating ANGPTL7 protein measurement. In some embodiments, the baseline ANGPTL7 protein measurement is obtained by an assay such as an immunoassay, a colorimetric assay, or a fluorescence assay.

[0449] In some embodiments, the baseline measurement is a baseline ANGPTL7 mRNA measurement. In some embodiments, the baseline ANGPTL7 mRNA measurement comprises a baseline ANGPTL7 mRNA level. In some embodiments, the baseline ANGPTL7 mRNA level is indicated as a mass or percentage of ANGPTL7 mRNA per sample weight. In some embodiments, the baseline ANGPTL7 mRNA level is indicated as a mass or percentage of ANGPTL7 mRNA per sample volume. In some embodiments, the baseline ANGPTL7 mRNA level is indicated as a mass or percentage of ANGPTL7 mRNA per total mRNA within the sample. In some embodiments, the baseline ANGPTL7 mRNA level is indicated as a mass or percentage of ANGPTL7 mRNA per total nucleic acids within the sample. In some embodiments, the baseline ANGPTL7 mRNA level is indicated relative to another mRNA level, such as an mRNA level of a housekeeping gene, within the sample. In some embodiments, the baseline ANGPTL7 mRNA measurement is obtained by an assay such as a polymerase chain reaction (PCR) assay. In some embodiments, the PCR comprises quantitative PCR (qPCR). In some embodiments, the PCR comprises reverse transcription of the ANGPTL7 mRNA.

[0450] Some embodiments of the methods described herein include obtaining a sample from a subject. In some embodiments, the baseline measurement is obtained in a sample obtained from the subject. In some embodiments, the sample is obtained from the subject prior to administration or treatment of the subject with a composition described herein. In some embodiments, a baseline measurement is obtained in a sample obtained from the subject prior to administering the composition to the subject. In some embodiments, the sample comprises ocular or eye tissue.

[0451] In some embodiments, the sample comprises a fluid. In some embodiments, the sample is a fluid sample. In some embodiments, the sample is a blood, plasma, or serum sample. In some embodiments, the fluid comprises an eye fluid. In some embodiments, the fluid comprises an intraocular fluid.

[0452] In some embodiments, the baseline measurement is obtained noninvasively. In some embodiments, the baseline measurement is obtained directly from the subject.

[0453] Effects

[0454] In some embodiments, the composition or administration of the composition affects a measurement such as a pressure measurement, an intraocular pressure measurement, incidence of glaucoma, incidence of a glaucoma subtype, or incidence of a glaucoma symptom, relative to the baseline measurement. In some embodiments, the measurement is an intraocular pressure measurement.

[0455] Some embodiments of the methods described herein include obtaining the measurement from a subject. For example, the measurement may be obtained from the subject after treating the subject. In some embodiments, the measurement is obtained in a second sample (such as a fluid or tissue sample described herein) obtained from the subject after the composition is administered to the subject. In some embodiments, the measurement is an indication that the disorder has been treated.

[0456] In some embodiments, the measurement is obtained by an assay as described herein. For example, the assay may comprise an immunoassay, a colorimetric assay, a fluorescence assay, or a PCR assay.

[0457] In some embodiments, the measurement is obtained within 1 week, within 2 weeks, within 3 weeks, within 1 month, within 2 months, within 3 months, within 6 months, within 1 year, within 2 years, within 3 years, within 4 years, or within 5 years after the administration of the composition. In some embodiments, the measurement is obtained after 1 week, after 2 weeks, after 3 weeks, after 1 month, after 2 months, after 3 months, after 6 months, after 1 year, after 2 years, after 3 years, after 4 years, or after 5 years, following the administration of the composition.

[0458] In some embodiments, the composition reduces the measurement relative to the baseline measurement. In some embodiments, the reduction is measured in a second tissue sample obtained from the subject after administering the composition to the subject. In some embodiments, the reduction is measured directly in the subject after administering the composition to the subject. In some embodiments, the measurement is decreased by about 2.5% or more, about 5% or more, or about 7.5% or more, relative to the baseline measurement. In some embodiments, the measurement is decreased by about 10% or more, relative to the baseline measurement. In some embodiments, the measurement is decreased by about 20% or more, about 30% or more, about 40% or more, about 50% or more, about 60% or more, about 70% or more, about 80% or more, about 90% or more, relative to the baseline measurement. In some embodiments, the measurement is decreased by no more than about 2.5%, no more than about 5%, or no more than about 7.5%, relative to the baseline measurement. In some embodiments, the measurement is decreased by no more than about 10%, relative to the baseline measurement. In some embodiments, the measurement is decreased by no more than about 20%, no more than about 30%, no more than about 40%, no more than about 50%, no more than about 60%, no more than about 70%, no more than about 80%, no more than about 90%, or no more than about 100% relative to the baseline measurement. In some embodiments, the measurement is decreased by 2.5%, 5%, 7.5%, 10%, 20%, 30%, 40%, 50%, 60%, 70%, 80%, 90%, or 100%, or by a range defined by any of the two aforementioned percentages.

[0459] In some embodiments, the measurement is an ANGPTL7 protein measurement. In some embodiments, the ANGPTL7 protein measurement comprises an ANGPTL7 protein level. In some embodiments, the ANGPTL7 protein level is indicated as a mass or percentage of ANGPTL7 protein per sample weight. In some embodiments, the ANGPTL7 protein level is indicated as a mass or percentage of ANGPTL7 protein per sample volume. In some embodiments, the ANGPTL7 protein level is indicated as a mass or percentage of ANGPTL7 protein per total protein within the sample. In some embodiments, the ANGPTL7 protein measurement is a circulating ANGPTL7 protein measurement. In some embodiments, the baseline ANGPTL7 protein measurement is obtained by an assay such as an immunoassay, a colorimetric assay, or a fluorescence assay.

[0460] In some embodiments, the composition reduces the ANGPTL7 protein measurement relative to the baseline ANGPTL7 protein measurement. In some embodiments, the composition reduces circulating ANGPTL7 protein levels relative to the baseline ANGPTL7 protein measurement. In some embodiments, the composition reduces tissue ANGPTL7 protein levels (such as ocular ANGPTL7 protein levels) relative to the baseline ANGPTL7 protein measurement. In some embodiments, the reduced ANGPTL7 protein levels are measured in a second sample obtained from the subject after administering the composition to the subject.

[0461] In some embodiments, the ANGPTL7 protein measurement is decreased by about 2.5% or more, about 5% or more, or about 7.5% or more, relative to the baseline ANGPTL7 protein measurement. In some embodiments, the ANGPTL7 protein measurement is decreased by about 10% or more, relative to the baseline ANGPTL7 protein measurement. In some embodiments, the ANGPTL7 protein measurement is decreased by about 20% or more, about 30% or more, about 40% or more, about 50% or more, about 60% or more, about 70% or more, about 80% or more, about 90% or more, or about 100% or more relative to the baseline ANGPTL7 protein measurement. In some embodiments, the ANGPTL7 protein measurement is decreased by no more than about 2.5%, no more than about 5%, or no more than about 7.5%, relative to the baseline ANGPTL7 protein measurement. In some embodiments, the ANGPTL7 protein measurement is decreased by no more than about 10%, relative to the baseline ANGPTL7 protein measurement. In some embodiments, the ANGPTL7 protein measurement is decreased by no more than about 20%, no more than about 30%, no more than about 40%, no more than about 50%, no more than about 60%, no more than about 70%, no more than about 80%, no more than about 90%, or no more than about 100% relative to the baseline ANGPTL7 protein measurement. In some embodiments, the ANGPTL7 protein measurement is decreased by 2.5%, 5%, 7.5%, 10%, 20%, 30%, 40%, 50%, 60%, 70%, 80%, 90%, 100%, or by a range defined by any of the two aforementioned percentages.

[0462] In some embodiments, the measurement is an ANGPTL7 mRNA measurement. In some embodiments, the ANGPTL7 mRNA measurement comprises an ANGPTL7 mRNA level. In some embodiments, the ANGPTL7 mRNA level is indicated as a mass or percentage of ANGPTL7 mRNA per sample weight. In some embodiments, the ANGPTL7 mRNA level is indicated as a mass or percentage of ANGPTL7 mRNA per sample volume. In some embodiments, the ANGPTL7 mRNA level is indicated as a mass or percentage of ANGPTL7 mRNA per total mRNA within the sample. In some embodiments, the ANGPTL7 mRNA level is indicated as a mass or percentage of ANGPTL7 mRNA per total nucleic acids within the sample. In some embodiments, the ANGPTL7 mRNA level is indicated relative to another mRNA level, such as an mRNA level of a housekeeping gene, within the sample. In some embodiments, the ANGPTL7 mRNA measurement is obtained by an assay such as a PCR assay. In some embodiments, the PCR comprises qPCR. In some embodiments, the PCR comprises reverse transcription of the ANGPTL7 mRNA.

[0463] In some embodiments, the composition reduces the ANGPTL7 mRNA measurement relative to the baseline ANGPTL7 mRNA measurement. In some embodiments, the ANGPTL7 mRNA measurement is obtained in a second sample obtained from the subject after administering the composition to the subject. In some embodiments, the composition reduces ANGPTL7 mRNA levels relative to the baseline ANGPTL7 mRNA levels. In some embodiments, the reduced ANGPTL7 mRNA levels are measured in a second sample obtained from the subject after administering the composition to the subject. In some embodiments, the second sample is an ocular sample.

[0464] In some embodiments, the ANGPTL7 mRNA measurement is reduced by about 2.5% or more, about 5% or more, or about 7.5% or more, relative to the baseline ANGPTL7 mRNA measurement. In some embodiments, the ANGPTL7 mRNA measurement is decreased by about 10% or more, relative to the baseline ANGPTL7 mRNA measurement. In some embodiments, the ANGPTL7 mRNA measurement is decreased by about 20% or more, about 30% or more, about 40% or more, about 50% or more, about 60% or more, about 70% or more, about 80% or more, about 90% or more, or about 100% or more relative to the baseline ANGPTL7 mRNA measurement. In some embodiments, the ANGPTL7 mRNA measurement is decreased by no more than about 2.5%, no more than about 5%, or no more than about 7.5%, relative to the baseline ANGPTL7 mRNA measurement. In some embodiments, the ANGPTL7 mRNA measurement is decreased by no more than about 10%, relative to the baseline ANGPTL7 mRNA measurement. In some embodiments, the ANGPTL7 mRNA measurement is decreased by no more than about 20%, no more than about 30%, no more than about 40%, no more than about 50%, no more than about 60%, no more than about 70%, no more than about 80%, no more than about 90%, or no more than about 100% relative to the baseline ANGPTL7 mRNA measurement. In some embodiments, the ANGPTL7 mRNA measurement is decreased by 2.5%, 5%, 7.5%, 10%, 20%, 30%, 40%, 50%, 60%, 70%, 80%, 90%, 100%, or by a range defined by any of the two aforementioned percentages.

[0465] In some embodiments, the composition reduces the intraocular pressure measurement relative to the baseline intraocular pressure measurement. In some embodiments, the intraocular pressure measurement is reduced by about 2.5% or more, about 5% or more, or about 7.5% or more, relative to the baseline intraocular pressure measurement. In some embodiments, the intraocular pressure measurement is decreased by about 10% or more, relative to the baseline intraocular pressure measurement. In some embodiments, the intraocular pressure measurement is decreased by about 20% or more, about 30% or more, about 40% or more, about 50% or more, about 60% or more, about 70% or more, about 80% or more, about 90% or more, or about 100% or more relative to the baseline intraocular pressure measurement. In some embodiments, the intraocular pressure measurement is decreased by no more than about 2.5%, no more than about 5%, or no more than about 7.5%, relative to the baseline intraocular pressure measurement. In some embodiments, the intraocular pressure measurement is decreased by no more than about 10%, relative to the baseline intraocular pressure measurement. In some embodiments, the intraocular pressure measurement is decreased by no more than about 20%, no more than about 30%, no more than about 40%, no more than about 50%, no more than about 60%, no more than about 70%, no more than about 80%, no more than about 90%, or no more than about 100% relative to the baseline intraocular pressure measurement. In some embodiments, the intraocular pressure measurement is decreased by 2.5%, 5%, 7.5%, 10%, 20%, 30%, 40%, 50%, 60%, 70%, 80%, 90%, 100%, or by a range defined by any of the two aforementioned percentages.

[0466] Methods of Inhibiting or Modulating Expression of the Target Gene

[0467] Embodiments also relate to methods for inhibiting the expression of a target gene. The method comprises the step of administering the dsRNA agents in any of the preceding embodiments, in an amount sufficient to inhibit expression of the target gene. In some embodiments, the target gene is ANGPTL7. Another aspect relates to a method of modulating the expression of a target gene in a cell, comprising providing to said cell a dsRNA agent. In some embodiments, the target gene is ANGPTL7. In some embodiments, the antisense oligonucleotide or dsRNA agent described herein is modified.

[0468] The present disclosure provides in vitro and in vivo methods for treatment of a disease or disorder in a mammal by downregulating or silencing the transcription and/or translation of a target gene or gene transcript of interest. In some embodiments, the method comprises introducing a dsRNA agent that silences expression (e.g., mRNA and/or protein levels) of a target sequence into a cell by contacting the cell with a modified dsRNA agent described herein. In some embodiments, the method comprises in vivo delivery of a dsRNA agent that silences expression of a target sequence by administering to a mammal a modified dsRNA described herein. Administration of the dsRNA can be by any route known in the art, such as, e.g., oral, intranasal, inhalation, intravenous, intraperitoneal, intramuscular, intra-articular, intralesional, intratracheal, endotracheal, subcutaneous, or intradermal. In some cases, delivery is by respiratory tract administration. In some embodiments, the target sequence is ANGPTL7.

[0469] In certain embodiments, the dsRNA agent comprises a carrier system, e.g., to deliver the dsRNA agent into a cell of a mammal. Non-limiting examples of carrier systems include nucleic acid-lipid particles, liposomes, micelles, virosomes, nucleic acid complexes, and mixtures thereof. In certain instances, the dsRNA molecule is complexed with a lipid such as a cationic lipid to form a lipoplex. In certain instances, the dsRNA agent is complexed with a polymer such as a cationic polymer (e.g., polyethylenimine (PEI)) to form a polyplex. The dsRNA agent may also be complexed with cyclodextrin or a polymer thereof. In some embodiments, the dsRNA agent is encapsulated in a nucleic acid-lipid particle.

[0470] Assessing Up-Regulation or Inhibition of Gene or Transcript Expression

[0471] Transfer of an exogenous nucleic acid into a host cell or organism can be assessed by directly detecting the presence of the nucleic acid in the cell or organism. For example, the presence of the exogenous nucleic acid can be detected by Southern blot or by a polymerase chain reaction (PCR) technique using primers that specifically amplify nucleotide sequences associated with the nucleic acid. Expression of the exogenous nucleic acids can also be measured using conventional methods including gene expression analysis. For instance, mRNA produced from an exogenous nucleic acid can be detected and quantified using a northern blot and reverse transcription PCR (RT-PCR).

[0472] Expression of RNA from the exogenous nucleic acid can also be detected by measuring an enzymatic activity or a reporter protein activity. For example, dsRNA modulatory activity can be measured indirectly as a decrease or increase in target nucleic acid expression as an indication that the exogenous nucleic acid is producing the effector RNA. Based on sequence conservation, primers can be designed and used to amplify coding regions of the target genes. Initially, the most highly expressed coding region from each gene can be used to build a model control gene, although any coding or non-coding region can be used. Each control gene is assembled by inserting each coding region between a reporter coding region and its poly(A) signal. These plasmids would produce an mRNA with a reporter gene in the upstream portion of the gene and a potential RNAi target in the 3′ non-coding region. The effectiveness of individual dsRNA would be assayed by modulation of the reporter gene. Reporter genes include acetohydroxyacid synthase (AHAS), alkaline phosphatase (AP), beta galactosidase (LacZ), beta glucoronidase (GUS), chloramphenicol acetyltransferase (CAT), green fluorescent protein (GFP), red fluorescent protein (RFP), yellow fluorescent protein (YFP), cyan fluorescent protein (CFP), horseradish peroxidase (HRP), luciferase (Lac), nopaline synthase (NOS), octopine synthase (OCS), and derivatives thereof. Multiple selectable markers are available that confer resistance to ampicillin, bleomycin, chloramphenicol, gentamycin, hygromycin, kanamycin, lincomycin, methotrexate, phosphinothricin, puromycin, and tetracycline. Methods to determine modulation of a reporter gene are well known in the art, and include, but are not limited to, fluorometric methods (e.g. fluorescence spectroscopy, Fluorescence Activated Cell Sorting (FACS), fluorescence microscopy), antibiotic resistance determination.

[0473] ANGPTL7 protein and mRNA expression can be assayed using for example, immunoassays such as the ELISA to measure protein levels.

[0474] In some embodiments, ANGPTL7 expression (e.g., mRNA or protein) in a sample (e.g., cells or tissues in vivo or in vitro) treated using a dsRNA agent is evaluated by comparison with ANGPTL7 expression in a control sample. For example, expression of the protein or nucleic acid can be compared using a mock-treated or untreated sample. In some cases, comparison with a sample treated with a control dsRNA agent (e.g., one having an altered or different sequence) can be made depending on the information desired. In some embodiments, a difference in the expression of the ANGPTL7 protein or nucleic acid in a treated vs. an untreated sample can be compared with the difference in expression of a different nucleic acid (including any standard deemed appropriate by the researcher, e.g., a housekeeping gene) in a treated sample vs. an untreated sample.

[0475] Observed differences can be expressed as desired, e.g., in the form of a ratio or fraction, for use in a comparison with control. In embodiments, the level of ANGPTL7 mRNA or protein, in a sample treated with a dsRNA, is increased or decreased by about 1.25-fold to about 10-fold or more relative to an untreated sample or a sample treated with a control nucleic acid. In embodiments, the level of ANGPTL7 mRNA or protein is increased or decreased by at least about 1.25-fold, at least about 1.3-fold, at least about 1.4-fold, at least about 1.5-fold, at least about 1.6-fold, at least about 1.7-fold, at least about 1.8-fold, at least about 2-fold, at least about 2.5-fold, at least about 3-fold, at least about 3.5-fold, at least about 4-fold, at least about 4.5-fold, at least about 5-fold, at least about 5.5-fold, at least about 6-fold, at least about 6.5-fold, at least about 7-fold, at least about 7.5-fold, at least about 8-fold, at least about 8.5-fold, at least about 9-fold, at least about 9.5-fold, or at least about 10-fold or more.

[0476] Kits, Research Reagents, Diagnostics, and Therapeutics

[0477] The compounds disclosed herein can be utilized for diagnostics, therapeutics, and prophylaxis, and as research reagents and components of kits. Furthermore, dsRNA, which inhibit gene expression may be used to elucidate the function of particular genes or to distinguish between functions of various members of a biological pathway.

[0478] For use in kits and diagnostics and in various biological systems, the compounds disclosed herein, either alone or in combination with other compounds or therapeutics, may be useful as tools in differential and/or combinatorial analyses to elucidate expression patterns of a portion or the entire complement of genes expressed within cells and tissues.

[0479] In some embodiments, the term “biological system” or “system” is any organism, cell, cell culture or tissue that expresses, or is made competent to express products of the angiopoietin like 7 (ANGPTL7) genes. These include, but are not limited to, humans, transgenic animals, cells, cell cultures, tissues, xenografts, transplants and combinations thereof.

[0480] As one non-limiting example, expression patterns within cells or tissues treated with one or more dsRNAs are compared to control cells or tissues not treated with dsRNAs and the patterns produced are analyzed for differential levels of gene expression as they pertain, for example, to disease association, signaling pathway, cellular localization, expression level, size, structure or function of the genes examined. These analyses can be performed on stimulated or unstimulated cells and in the presence or absence of other compounds that affect expression patterns.

[0481] Examples of methods of gene expression analysis include DNA arrays or microarrays, SAGE (serial analysis of gene expression), READS (restriction enzyme amplification of digested cDNAs), TOGA (total gene expression analysis), protein arrays and proteomics, expressed sequence tag (EST) sequencing, subtractive RNA fingerprinting (SuRF), subtractive cloning, differential display (DD), comparative genomic hybridization, FISH (fluorescent in situ hybridization) techniques and mass spectrometry methods.

[0482] In some embodiments, the compounds disclosed herein are useful for research and diagnostics, because these compounds hybridize to nucleic acids encoding angiopoietin-like 7 (ANGPTL7). For example, oligonucleotides that hybridize with such efficiency and under such conditions as disclosed herein as to be effective ANGPTL7 modulators are effective primers or probes under conditions favoring gene amplification or detection, respectively. These primers and probes are useful in methods requiring the specific detection of nucleic acid molecules encoding ANGPTL7 and in the amplification of said nucleic acid molecules for detection or for use in further studies of ANGPTL7. Hybridization of the antisense oligonucleotides, particularly the primers and probes, with a nucleic acid encoding ANGPTL7 can be detected, e.g., by conjugation of an enzyme to the oligonucleotide, radiolabeling of the oligonucleotide, or any other suitable detection means. Kits using such detection means for detecting the level of ANGPTL7 in a sample may also be prepared.

[0483] The specificity and sensitivity of sRNA are also harnessed for therapeutic uses. For therapeutics, an animal, e.g., a human, suspected of having a disease or disorder which can be treated by modulating the expression of ANGPTL7 polynucleotides is treated by administering oligonucleotide compounds disclosed herein. For example, in one non-limiting embodiment, the methods comprise the step of administering to the animal in need of treatment, a therapeutically effective amount of ANGPTL7 modulator. The ANGPTL7 modulators disclosed herein effectively modulate the activity of the ANGPTL7 or modulate the expression of the ANGPTL7 protein. In some embodiments, the activity or expression of ANGPTL7 in an animal is inhibited or modulated by about 10% as compared to a control. The control may be an oligonucleotide that does not specifically hybridize to ANGPTL7. In some cases, the activity or expression of ANGPTL7 in an animal is inhibited or modulated by about 30%. In some cases, the activity or expression of ANGPTL7 in an animal is inhibited or modulated by 50% or more. Thus, the oligomeric compounds may modulate expression of angiopoietin like 7 (ANGPTL7) mRNA by at least 10%, by at least 50%, by at least 25%, by at least 30%, by at least 40%, by at least 50%, by at least 60%, by at least 70%, by at least 75%, by at least 80%, by at least 85%, by at least 90%, by at least 95%, by at least 98%, by at least 99%, or by 100% as compared to a control. The reduction of or modulation in the expression of angiopoietin-like 7, (ANGPTL7) may be measured in serum, blood, adipose tissue, liver or any other body fluid, tissue or organ of the animal. In some cases, the cells contained within said fluids, tissues or organs being analyzed contain a nucleic acid molecule encoding ANGPTL7 peptides and or the ANGPTL7 protein itself.

[0484] Drug Discovery

[0485] The compounds disclosed herein can also be applied in the areas of drug discovery and target validation. The compounds and target segments identified herein may be used in drug discovery efforts to elucidate relationships that exist between angiopoietin like 7 (ANGPTL7) polynucleotides and a disease state, phenotype, or condition. These methods include detecting or modulating ANGPTL7 polynucleotides comprising contacting a sample, tissue, cell, or organism with the compounds disclosed herein, measuring the nucleic acid or protein level of ANGPTL7 polynucleotides and/or a related phenotypic or chemical endpoint at some time after treatment, and optionally comparing the measured value to a non-treated sample or sample treated with a further compound disclosed herein. These methods can also be performed in parallel or in combination with other experiments to determine the function of unknown genes for the process of target validation or to determine the validity of a particular gene product as a target for treatment or prevention of a particular disease, condition, or phenotype.

[0486] This disclosure is further illustrated by the following examples, which should not be construed as further limiting. The contents of all references, pending patent applications and published patents, cited throughout this application are hereby expressly incorporated by reference.

### EMBODIMENTS

[0487] Some embodiments include one or more of the following:

[0488] 1. An RNA interference (RNAi) agent capable of inhibiting or modulating the expression of angiopoietin-like 7 (ANGPTL7), wherein the RNAi agent comprises a double-stranded RNA (dsRNA) comprising a sense strand and an antisense strand, each strand having 14 to 30 nucleotides.

[0489] 2. The RNAi agent of embodiment 1, wherein the dsRNA has a length of 17-30 nucleotide pairs.

[0490] 3. The RNAi agent of embodiment 1 or embodiment 2, wherein the sense strand and antisense strand each have 17-30 nucleotides.

[0491] 4. The RNAi agent of any of embodiments 1-3, wherein the sense strand comprises a sequence at least about 80%, 85%, 90%, 95%, or 100% identical to a sequence selected from SEQ ID NOS: 1-4412.

[0492] 5. The RNAi agent of any of embodiments 1-4, wherein the antisense strand comprises a sequence at least about 80%, 85%, 90%, 95%, or 100% identical to the reverse complement of the sense strand.

[0493] 6. The RNAi agent of any of embodiments 1-5, wherein the antisense strand comprises a sequence at least about 80%, 85%, 90%, 95%, or 100% identical to a sequence selected from SEQ ID NOS: 1-4412.

[0494] 7. The RNAi agent of any of embodiments 1-3, wherein the sequence of the sense strand comprises SEQ ID NO: 11089 and the sequence of the antisense strand comprises SEQ ID NO: 11090.

[0495] 8. The RNAi agent of any of embodiments 1-7, comprising one or more nucleotide modifications selected from the group consisting of LNA, HNA, CeNA, 2′-methoxyethyl, 2′-O-alkyl, 2′-O-allyl, 2′-C-allyl, 2′-fluoro, and 2′-deoxy.

[0496] 9. The RNAi agent of any of embodiments 1-8, wherein the nucleotides are modified with either 2′-OCH₃ or 2′-F.

[0497] 10. The RNAi agent of any of embodiments 1-9, further comprising at least one ligand.

[0498] 11. The RNAi agent of any of embodiments 1-10, comprising one or more nucleotide modifications selected from the group consisting of 2′-O-methyl nucleotide, 2′-deoxyfluoro nucleotide, 2′-O—N-methylacetamido (2′-O-NMA) nucleotide, a 2′-O-dimethylaminoethoxyethyl (2′-0-DMAEOE) nucleotide, 2′-O-aminopropyl (2′-O-AP) nucleotide, and 2′-ara-F.

[0499] 12. The RNAi agent of any of embodiments 1-11, further comprising at least one phosphorothioate or methylphosphonate internucleotide linkage.

[0500] 13. The RNAi agent of any of embodiments 1-12, wherein the nucleotide at the 1 position of the 5′-end of the antisense strand of the dsRNA is selected from the group consisting of A, dA, dU, U, and dT.

[0501] 14. The RNAi agent of any of embodiments 1-13, wherein the base pair at the 1 position of the 5′-end of the dsRNA is an AU base pair.

[0502] 15. An RNA interference (RNAi) agent capable of inhibiting or modulating the expression of ANGPTL7, wherein the RNAi agent comprises a double-stranded RNA (dsRNA) comprising a sense strand and an antisense strand, each of the strands having 14 to 30 nucleotides, wherein the sense strand contains at least two motifs of three identical modifications on three consecutive nucleotides, a first of said sense strand motifs occurring at a cleavage site in the sense strand and a second of said sense strand motifs occurring at a different region of the sense strand that is separated from the first sense strand motif by at least one nucleotide; and wherein the antisense strand contains at least two motifs of three identical modifications on three consecutive nucleotides, a first of said antisense strand motifs occurring at or near the cleavage site in the antisense strand and a second of said antisense strand motifs occurring at a different region of the antisense strand that is separated from the first antisense strand motif by at least one nucleotide; wherein the modification in the first antisense strand motif is different than the modification in the second antisense strand motif.

[0503] 16. The RNAi agent of embodiment 15, wherein at least one of the nucleotides occurring in the first sense strand motif forms a base pair with one of the nucleotides in the first antisense strand motif.

[0504] 17. The RNAi agent of embodiment 15 or embodiment 16, wherein the dsRNA has 17-30 nucleotide base pairs.

[0505] 18. The RNAi agent of embodiment 17, wherein the dsRNA has 17-19 nucleotide base pairs.

[0506] 19. The RNAi agent of any of embodiments 15-18, wherein each strand has 17-23 nucleotides.

[0507] 20. The RNAi agent of any of embodiments 15-19, wherein the modifications on the nucleotides of the sense strand and/or antisense strand are selected from the group consisting of LNA, HNA, CeNA, 2′-methoxyethyl, 2′-O-alkyl, 2′-O-allyl, 2′-C-allyl, 2′-fluoro, 2′-deoxy, and combinations thereof.

[0508] 21. The RNAi agent of any of embodiments 15-20, wherein the modifications on the nucleotides of the sense strand and/or antisense strand are 2′—OCH3 or 2′-F.

[0509] 22. The RNAi agent of any of embodiments 15-21, further comprising a ligand attached to the 3′ end of the sense strand.

[0510] 23. An RNA interference (RNAi) agent capable of inhibiting or modulating the expression of ANGPTL7, wherein the RNAi agent comprises a double-stranded RNA (dsRNA) comprising a sense strand and an antisense strand, each of the strands having 14 to 30 nucleotides, wherein the sense strand contains at least one motif of three 2′-F modifications on three consecutive nucleotides, one of said motifs occurring at or near the cleavage site in the sense strand; and wherein the antisense strand contains at least one motif of three 2′-O-methyl modifications on three consecutive nucleotides, one of said motifs occurring at or near the cleavage site in the antisense strand.

[0511] 24. The RNAi agent of embodiment 23, wherein the sense strand comprises a sequence at least about 80%, 85%, 90%, 95%, or 100% identical to a sequence selected from SEQ ID NOS: 1-4412.

[0512] 25. The RNAi agent of embodiment 23 or embodiment 24, wherein the antisense strand comprises a sequence at least about 80%, 85%, 90%, 95%, or 100% identical to the reverse complement of the sense strand.

[0513] 26. The RNAi agent of any of embodiments 23-25, wherein the antisense strand comprises a sequence at least about 80%, 85%, 90%, 95%, or 100% identical to a sequence selected from SEQ ID NOS: 1-4412.

[0514] 27. A method of modulating a function of and/or the expression of an angiopoietin-like 7 (ANGPTL7) polynucleotide in patient cells or tissues, in vivo or in vitro, the method comprising: contacting said cells or tissues with at least one antisense oligonucleotide 5 to 30 nucleotides in length, wherein said at least one antisense oligonucleotide has at least 50% sequence identity to a reverse complement of a polynucleotide comprising 5 to 30 consecutive nucleotides within nucleotides 1 to 2224 of SEQ ID NO: 11085; thereby modulating a function of and/or the expression of the angiopoietin like 7 (ANGPTL7) polynucleotide in patient cells or tissues, in vivo or in vitro.

[0515] 28. A method of modulating a function of and/or the expression of an angiopoietin like 7 (ANGPTL7) polynucleotide in patient cells or tissues, in vivo or in vitro, the method comprising: contacting said cells or tissues with at least one antisense oligonucleotide 5 to 30 nucleotides in length, wherein said antisense oligonucleotide has at least 50% sequence identity to an antisense oligonucleotide to the angiopoietin-like 7 (ANGPTL7) polynucleotide; thereby modulating a function of and/or the expression of the angiopoietin-like 7 (ANGPTL7) polynucleotide in patient cells or tissues, in vivo or in vitro.

[0516] 29. A method of modulating a function of and/or the expression of an angiopoietin-like 7 (ANGPTL7) polynucleotide in patient cells or tissues, in vivo or in vitro, the method comprising: contacting said cells or tissues with at least one antisense oligonucleotide that targets a region of a natural antisense oligonucleotide of the angiopoietin-like 7 (ANGPTL7) polynucleotide; thereby modulating a function of and/or the expression of the angiopoietin-like 7 (ANGPTL7) polynucleotide in patient cells or tissues, in vivo or in vitro.

[0517] 30. A method of modulating a function of and/or the expression of an angiopoietin-like 7 (ANGPTL7) polynucleotide in patient cells or tissues, in vivo or in vitro, the method comprising: contacting said cells or tissues with at least one antisense oligonucleotide 5 to 30 nucleotides in length; thereby modulating a function of and/or the expression of the ANGPTL7 polynucleotide in patient cells or tissues, in vivo or in vitro.

[0518] 31. The method of any one of embodiments 27-29, wherein the at least one antisense oligonucleotide comprises SEQ ID NO: 11087.

[0519] 32. The method of embodiment 30, wherein the at least one antisense oligonucleotide comprises a sequence selected from SEQ ID NOS: 4413-11084.

[0520] 33. The method of any one of embodiments 27-29, wherein the at least one antisense oligonucleotide comprises a sequence at least about 80%, 85%, 90%, 95% identical to SEQ ID SEQ ID NOS: 4413-11084.

[0521] 34. The method of any of embodiments 27-33, wherein a function of and/or the expression of the angiopoietin-like 7 (ANGPTL7) is increased in vivo or in vitro with respect to a control oligonucleotide that does not target or specifically hybridize to ANGPTL7.

[0522] 35. The method of any of embodiments 27-33, wherein a function of and/or the expression of the angiopoietin-like 7 (ANGPTL7) is decreased in vivo or in vitro with respect to a control oligonucleotide that does not target or specifically hybridize to ANGPTL7.

[0523] 36. The method of any of embodiments 27-35, wherein the at least one antisense oligonucleotide targets a natural antisense sequence of an angiopoietin-like 7 (ANGPTL7) polynucleotide.

[0524] 37. The method of any of embodiments 27-36, wherein the at least one antisense oligonucleotide targets a nucleic acid sequence comprising coding and/or non-coding nucleic acid sequences of an angiopoietin like 7 (ANGPTL7) polynucleotide.

[0525] 38. The method of any of embodiments 27-37, wherein the at least one antisense oligonucleotide targets overlapping and/or non-overlapping sequences of an angiopoietin-like 7 (ANGPTL7) polynucleotide.

[0526] 39. The method of any of embodiments 27-38, wherein the at least one antisense oligonucleotide comprises one or more modifications.

[0527] 40. The method of embodiment 39, wherein the one or more modifications is selected from: at least one modified sugar moiety, at least one modified internucleoside linkage, at least one modified nucleotide, and combinations thereof.

[0528] 41. The method of embodiment 39, wherein the one or more modifications comprise at least one modified sugar moiety selected from: a 2′-O-methoxyethyl modified sugar moiety, a 2′-methoxy modified sugar moiety, a 2′-O-alkyl modified sugar moiety, a bicyclic sugar moiety, and combinations thereof.

[0529] 42. The method of embodiment 39, wherein the one or more modifications comprise at least one modified internucleoside linkage selected from: a phosphorothioate, 2′-O-methoxyethyl (MOE), 2′-fluoro, alkylphosphonate, phosphorodithioate, alkylphosphonothioate, phosphoramidate, carbamate, carbonate, phosphate triester, acetamidate, carboxymethyl ester, and combinations thereof.

[0530] 43. The method of embodiment 39, wherein the one or more modifications comprise at least one modified nucleotide selected from: a peptide nucleic acid (PNA), a locked nucleic acid (LNA), an arabino-nucleic acid (FANA), an analogue, a derivative, and combinations thereof.

[0531] 44. A method of modulating a function of and/or the expression of an angiopoietin-like 7 (ANGPTL7) gene in mammalian cells or tissues, in vivo or in vitro, the method comprising: contacting said cells or tissues with at least one short interfering RNA (siRNA) oligonucleotide 5 to 30 nucleotides in length, said at least one siRNA oligonucleotide being specific for an antisense polynucleotide of an angiopoietin-like 7 (ANGPTL7) polynucleotide, wherein said at least one siRNA oligonucleotide has at least 50% sequence identity to a complementary sequence of at least about five consecutive nucleic acids of the antisense and/or sense nucleic acid molecule of the angiopoietin-like 7 (ANGPTL7) polynucleotide; thereby modulating a function of and or the expression of angiopoietin-like 7, (ANGPTL7) in mammalian cells or tissues in vivo or in vitro.

[0532] 45. The method of embodiment 44, wherein said oligonucleotide has at least 80% sequence identity to a sequence of at least about five consecutive nucleic acids that is complementary to the antisense and/or sense nucleic acid molecule of the angiopoietin-like 7 (ANGPTL7) polynucleotide.

[0533] 46. The method of embodiment 44 or embodiment 45, wherein the at least one siRNA oligonucleotide comprises a sequence selected from SEQ ID NOS: 1-4412.

[0534] 47. The method of embodiment 44 or embodiment 45, wherein the at least one siRNA oligonucleotide comprises a sequence at least about 80%, 85%, 90%, 95%, or 100% identical to a sequence selected from SEQ ID NOS: 1-4412.

[0535] 48. A method of modulating a function of and/or the expression of angiopoietin-like 7, (ANGPTL7) in mammalian cells or tissues, in vivo or in vitro, the method comprising: contacting said cells or tissues with at least one antisense oligonucleotide of about 5 to 30 nucleotides in length, the antisense oligonucleotide specific for noncoding and/or coding sequences of a sense and/or natural antisense strand of an angiopoietin-like 7 (ANGPTL7) polynucleotide, wherein said at least one antisense oligonucleotide has at least 50% sequence identity to at least one nucleic acid sequence set forth as 1 to 2224 of SEQ ID NO: 11085 or its complement; thereby modulating the function and/or expression of the angiopoietin-like 7 (AGNPTL7) in mammalian cells or tissues, in vivo or in vitro.

[0536] 49. The method of embodiment 48, wherein the at least one antisense oligonucleotide comprises a sequence selected from SEQ ID NOS: 4413-11084.

[0537] 50. The method of embodiment 48, wherein the at least one antisense oligonucleotide comprises a sequence at least about 80%, 85%, 90%, 95% identical to SEQ ID NOS: 4413-11084.

[0538] 51. A synthetic, modified oligonucleotide comprising at least one modification wherein the at least one modification is selected from: at least one modified sugar moiety; at least one modified intenucleotide linkage; at least one modified nucleotide, and combinations thereof; wherein said oligonucleotide is an antisense compound which hybridizes to and modulates the function and/or expression of an angiopoietin-like 7 (ANGPTL7) polynucleotide in vivo or in vitro as compared to a control oligonucleotide that does not specifically hybridize to the ANGPTL7 polynucleotide.

[0539] 52. The oligonucleotide of embodiment 51, wherein the at least one modification comprises an internucleotide linkage selected from the group consisting of: phosphorothioate, alkylphosphonate, phosphorodithioate, alkylphosphonothioate, phosphoramidate, carbamate, carbonate, phosphate triester, acetamidate, carboxymethyl ester, and combinations thereof.

[0540] 53. The oligonucleotide of embodiment 52, wherein said oligonucleotide comprises at least one phosphorothioate internucleotide linkage.

[0541] 54. The oligonucleotide of embodiment 52, wherein said oligonucleotide comprises a backbone of phosphorothioate internucleotide linkages.

[0542] 55. The oligonucleotide of embodiment 52, wherein the oligonucleotide comprises at least one modified nucleotide, said modified nucleotide selected from: a peptide nucleic acid, a locked nucleic acid (LNA), and an analogue, derivative, and a combination thereof.

[0543] 56. The oligonucleotide of embodiment 51, wherein the oligonucleotide comprises a plurality of modifications, wherein said modifications comprise modified nucleotides selected from: phosphorothioate, alkylphosphonate, phosphorodithioate, alkylphosphonothioate, phosphoramidate, carbamate, carbonate, phosphate triester, acetamidate, carboxymethyl ester, and a combination thereof.

[0544] 57. The oligonucleotide of embodiment 51, wherein the oligonucleotide comprises a plurality of modifications, wherein said modifications comprise modified nucleotides selected from: peptide nucleic acids, locked nucleic acids (LNA), and analogues, derivatives, and a combination thereof.

[0545] 58. The oligonucleotide of embodiment 51, wherein the oligonucleotide comprises at least one modified sugar moiety selected from: a 2′-O-methoxyethyl modified sugar moiety, a 2′-methoxy modified sugar moiety, a 2-O-alkyl modified sugar moiety, a bicyclic sugar moiety, and a combination thereof.

[0546] 59. The oligonucleotide of embodiment 51, wherein the oligonucleotide comprises a plurality of modifications, wherein said modifications comprise modified sugar moieties selected from: a 2′-O-methoxyethyl modified sugar moiety, a 2-methoxy modified sugar moiety, a 2′-O-alkyl modified sugar moiety, a bicyclic sugar moiety, and a combination thereof.

[0547] 60. The oligonucleotide of embodiment 51, wherein the oligonucleotide is of at least about 5 to 30 nucleotides in length and hybridizes to an antisense and/or sense strand of an angiopoietin-like 7 (ANGPTL7) polynucleotide, wherein said oligonucleotide has at least about 20% sequence identity to a complementary sequence of at least about five consecutive nucleic acids of the antisense and/or sense coding and/or noncoding nucleic acid sequences of the angiopoietin-like 7 (ANGPTL7) polynucleotide.

[0548] 61. The oligonucleotide of embodiment 51, wherein the oligonucleotide has at least about 80% sequence identity to a complementary sequence of at least about five consecutive nucleic acids of the antisense and or sense coding and/or noncoding nucleic acid sequence of the angiopoietin-like 7 (ANGPTL7) polynucleotide.

[0549] 62. The oligonucleotide of embodiment 51, wherein said oligonucleotide hybridizes to and modulates expression and/or function of at least one angiopoietin-like 7 (ANGPTL7) polynucleotide, in vivo or in vitro, as compared to the control oligonucleotide.

[0550] 63. The oligonucleotide of embodiment 51, wherein the oligonucleotide comprises the sequence set forth as SEQ ID NO: 11087.

[0551] 64. The oligonucleotide of any one of embodiments 51-63, wherein the at least one antisense oligonucleotide comprises SEQ ID NOS: 4413-11084.

[0552] 65. The oligonucleotide of any one of embodiments 51-63, wherein the at least one antisense oligonucleotide comprises a sequence at least about 80%, 85%, 90%, or 95% identical to SEQ ID NOS: 4413-11084.

[0553] 66. A composition comprising one or more oligonucleotides specific for one or more angiopoietin-like 7 (ANGPTL7) polynucleotides, said one or more oligonucleotides comprising an antisense sequence, complementary sequence, allele, homolog, isoform, variant, derivative, mutant, or fragment of the ANGPTL7 polynucleotide, or a combination thereof 67. The composition of embodiment 66 wherein the one or more oligonucleotides have at least about 40% sequence identity as compared to the nucleotide sequence set forth as SEQ ID NO: 11087.

[0554] 68. The composition of embodiment 66 or embodiment 67, wherein the oligonucleotide comprises the nucleotide sequence set forth as SEQ ID NO: 11087.

[0555] 69. The composition of embodiment 66, wherein the one or more oligonucleotides comprises a sequence selected from SEQ ID NOS: 1-4412.

[0556] 70. The composition of embodiment 66, wherein the one or more oligonucleotides comprises a sequence at least about 80%, 85%, 90%, 95%, or 100% identical to a sequence selected from SEQ ID NOS: 1-4412.

[0557] 71. The composition of any of embodiments 66-70, wherein the one or more oligonucleotides comprises one or more modifications or substitutions.

[0558] 72. The composition of embodiment 71, wherein the one or more modifications are selected from: phosphorothioate, methylphosphonate, peptide nucleic acid, locked nucleic acid (LNA) molecules, and combinations thereof.

[0559] 73. A method of preventing or treating a disease associated with at least one angiopoietin-like 7 (ANGPTL7) polynucleotide and/or at least one encoded product thereof, the method comprising: administering to a subject in need thereof a therapeutically effective dose of at least one antisense oligonucleotide that binds to a natural antisense sequence of said at least one angiopoietin-like 7 (ANGPTL7) polynucleotide and modulates expression of said at least one angiopoietin-like 7 (ANGPTL7) polynucleotide; thereby preventing or treating the disease associated with the at least one angiopoietin-like 7 (ANGPTL7) polynucleotide and or at least one encoded product thereof.

[0560] 74. A method of preventing or treating a disease associated with at least one angiopoietin-like 7 (ANGPTL7) polynucleotide and/or at least one encoded product thereof, the method comprising: administering to a subject in need thereof a therapeutically effective dose of at least one antisense oligonucleotide that binds to a natural sense sequence of said at least one angiopoietin-like 7 (ANGPTL7) polynucleotide and modulates expression of said at least one angiopoietin-like 7 (ANGPTL7) polynucleotide; thereby preventing or treating the disease associated with the at least one angiopoietin-like 7 (ANGPTL7) polynucleotide and or at least one encoded product thereof.

[0561] 75. The method of embodiment 73 or embodiment 74, wherein a disease associated with the at least one angiopoietin-like 7 (ANGPTL7) polynucleotide is selected from: a disease or disorder associated with abnormal function and/or expression of ANGPTL7, a disease or disorder associated with optic nerve damage, a disease or disorder associated with intraocular pressure, a degenerative retinal disease or disorder, an inflammatory eye disease or disorder, an allergic eye disease or disorder, a disease or disorder associated with degeneration or inflammation of the joints, a disease or disorder associated with abnormal lipid metabolism, cancer, Alzheimer's disease, dementia, stroke and brain ischemia.

[0562] 76. The method of embodiment 75, wherein the disease or disorder associated with optic nerve damage comprises primary open-angle glaucoma, primary angle-closure glaucoma, normal-tension glaucoma, pigmentary glaucoma, exfoliation glaucoma, juvenile glaucoma, congenital glaucoma, inflammatory glaucoma, phacogenic glaucoma, glaucoma secondary to intraocular hemorrhage, traumatic glaucoma, neovascular glaucoma, drug-induced glaucoma, toxic glaucoma, absolute glaucoma, ocular hypertension, or a combination thereof.

[0563] 77. The method of embodiment 75, wherein the disease or disorder associated with degeneration or inflammation of the joints comprises osteoarthritis, osteoarthrosis or a combination thereof.

[0564] 78. The method of embodiment 75, wherein the cancer is selected from lung cancer, epidermoid carcinoma, breast cancer, or a combination thereof.

[0565] 79. A method of identifying and selecting at least one oligonucleotide for in vivo administration comprising: identifying at least one oligonucleotide comprising at least five consecutive nucleotides which are complementary to ANGPTL7 or to a polynucleotide that is antisense to ANGPTL7; measuring the thermal melting point of a hybrid of an antisense oligonucleotide and the ANGPTL7 or the polynucleotide that is antisense to the ANGPTL7 under stringent hybridization conditions; and selecting at least one oligonucleotide for in vivo administration based on the information obtained.

[0566] 80. A method of treating a disease or condition mediated by ANGPTL7, the method comprising administering to a subject in need thereof an oligonucleotide comprising a sequence at least about 80%, 85%, 90%, 95%, or 100% identical to a sequence selected from SEQ ID NOS: 1-4412.

[0567] 81. The method of embodiment 80, wherein the oligonucleotide comprises a sequence selected from SEQ ID NOS: 1-4412.

[0568] 82. The method of embodiment 80 or embodiment 81, wherein the target is ANGPTL7.

[0569] 83. The method of any of embodiments 80-82, wherein the disease or condition comprises glaucoma (including, primary open-angle glaucoma, primary angle-closure glaucoma, normal-tension glaucoma, pigmentary glaucoma, exfoliation glaucoma, juvenile glaucoma, congenital glaucoma, inflammatory glaucoma, phacogenic glaucoma, glaucoma secondary to intraocular hemorrhage, traumatic glaucoma, neovascular glaucoma, drug-induced glaucoma, toxic glaucoma and absolute glaucoma), ocular hypertension, optic neuropathy or a combination thereof.

[0570] 84. The method of any of embodiments 80-83, wherein the oligonucleotide comprises dsRNA.

[0571] 85. The method of embodiment 84, wherein the oligonucleotide comprises a sequence at least about 80%, 85%, 90%, 95%, or 100% identical to a sequence selected from SEQ ID NOS: 1-4412.

[0572] 86. The method of any of embodiments 80-83, wherein the oligonucleotide comprises a sequence at least about 80%, 85%, 90%, 95%, or 100% identical to SEQ ID NOS: 4413-11084.

[0573] 87. A method of treating one or more disorders of the eye in a subject in need thereof comprising editing an ANGPTL7 gene in the subject wherein the one or more disorders of the eye comprises glaucoma or ocular hypertension.

[0574] 88. The method of embodiment 87, wherein the editing of the ANGPTL7 gene comprises administering CRISPR/cas9 to the subject.

[0575] 89. The method of embodiment 88, wherein the CRISPR/cas9 targets the ANGPTL7 gene.

[0576] 90. The method of embodiment 88, wherein the CRISPR/cas9 edits the ANGPTL7 gene to a loss of function mutation.

[0577] 91. The method of embodiment 90, wherein the loss of function mutation comprises a premature stop mutation.

[0578] 92. The method of embodiment 91, wherein the premature stop mutation occurs at amino acid position 177 according to the human protein sequence numbering.

[0579] 93. The method of embodiment 88, wherein the CRISPR/cas9 edits the ANGPTL7 gene to a missense mutation.

[0580] 94. The method of embodiment 93, wherein the missense mutation comprises a glutamine to histidine mutation.

[0581] 95. The method of embodiment 94, wherein the glutamine to histidine mutation occurs at amino acid position 175 according to the human protein sequence numbering.

[0582] 96. The method of embodiment 88, wherein the CRISPR/cas9 is delivered systemically to the subject.

[0583] 97. The method of embodiment 88, wherein the CRISPR/cas9 is delivered locally to the subject.

[0584] 98. The method of embodiment 97, wherein the CRISPR/cas9 is delivered locally to the eye of the subject.

[0585] 99. The method of embodiment 88, wherein the editing of the ANGPTL7 gene is efficacious in treating the one or more disorders of the eye.

[0586] 100. The method of embodiment 99, wherein the one or more disorders of the eye is glaucoma.

[0587] 101. The method of embodiment 99, wherein the subject has ocular hypertension.

[0588] 102. The method of embodiment 101, wherein imaging from the subject ocular hypertension demonstrates optic nerve damage.

[0589] 103. The method of embodiment 87, wherein the subject has received a first line treatment comprised of topical ocular prostaglandin analogues, beta-adrenergic blockers, alpha-adrenergic agonists, and carbonic anhydrase inhibitors for the one or more disorders of the eye.

[0590] 104. The method of embodiment 87, wherein the editing of the ANGPTL7 gene causes a reduction in or modulation of the production of the gene product of ANGPTL7 in the subject.

[0591] 105. The method of embodiment 87, wherein the editing of the ANGPTL7 gene causes a reduction in the subject of intraocular pressure.

[0592] 106. A composition comprising CRISPR/cas9 that targets ANGPTL7 that is efficacious in treating glaucoma or ocular hypertension.

[0593] 107. The composition of embodiment 106, wherein the CRISPR/cas9 edits the ANGPTL7 gene to a loss of function mutation.

[0594] 108. The composition of embodiment 107, wherein the loss of function mutation comprises a premature stop mutation.

[0595] 109. The composition of embodiment 108, wherein the premature stop mutation occurs at amino acid position 177 according to the human protein sequence numbering.

[0596] 110. The composition of embodiment 106, wherein the CRISPR/Cas9 edits the ANGPTL7 gene to a missense mutation.

[0597] 111. The composition of embodiment 110, wherein the missense mutation comprises a glutamine to histidine mutation.

[0598] 112. The composition of embodiment 111, wherein the glutamine to histidine mutation occurs at amino acid position 175 according to the human protein sequence numbering.

[0599] 113. A pharmaceutical composition comprising an siRNA molecule comprising a sense strand and an antisense strand, which targets SEQ ID NO. 11086 and when introduced to an eye of a patient in an effective amount reduces intraocular pressure of the eye; and a pharmaceutically acceptable carrier.

[0600] 114. The pharmaceutical composition of embodiment 113, wherein the siRNA molecule reduces intraocular pressure by at least 5%, at least 10%, at least 15%, at least 20%, at least 25%, at least 30% relative to a pre-treatment value of intraocular pressure in the eye of the patient.

[0601] 115. The pharmaceutical composition of embodiment 113, wherein the pharmaceutical composition is formulated for topical administration to the eye.

[0602] 116. The pharmaceutical composition of any of embodiments 113-115, wherein the siRNA has a length of 17-30 nucleotide pairs.

[0603] 117. The pharmaceutical composition of any of embodiments 113-115, wherein the sense strand and antisense strand each have 17-30 nucleotides.

[0604] 118. The pharmaceutical composition of any of embodiments 113-115, wherein the sense strand and antisense strand each have 21 nucleotides.

[0605] 119. The pharmaceutical composition of any of embodiments 113-117, wherein the sense strand comprises a sequence at least about 80%, 85%, 90%, 95%, or 100% identical to a sequence selected from SEQ ID NOS: 1-4412.

[0606] 120. The pharmaceutical composition of any of embodiments 113-118, wherein the antisense strand comprises a sequence at least about 80%, 85%, 90%, 95%, or 100% identical to the reverse complement of the sense strand.

[0607] 121. The pharmaceutical composition of any of embodiments 113-119, wherein the antisense strand comprises a sequence at least about 80%, 85%, 90%, 95%, or 100% identical to a sequence selected from SEQ ID NOS: 1-4412.

[0608] 122. The pharmaceutical composition of any of embodiments 113-116, wherein the sequence of the sense strand comprises SEQ ID NO: 11089 and the sequence of the antisense strand comprises SEQ ID NO: 11090.

[0609] 123. The pharmaceutical composition of any of embodiments 113-121, comprising a modified internucleoside linkage.

[0610] 124. The pharmaceutical composition of embodiment 123, wherein the modified internucleoside linkage comprises alkylphosphonate, phosphorothioate, methylphosphonate, phosphorodithioate, alkylphosphonothioate, phosphoramidate, carbamate, carbonate, phosphate triester, acetamidate, or carboxymethyl ester, or a combination thereof.

[0611] 125. The pharmaceutical composition of embodiment 124, wherein the modified internucleoside linkage comprises one or more phosphorothioate linkages.

[0612] 126. The pharmaceutical composition of embodiment 125, wherein the one or more phosphorothioate linkages is about 1, 2, 3, 4, 5, 6, 7, 8, 9, 10, 11, 12, 13, 14, 15, 16, 17, 18, 19, 20, 21, 22, 23, 24, 25, 26, 27, 28, 29, 30, 31, 32, 33, 34, 35, 36, 37, 38, 39, 40, 41, or 42 phosphorothioate linkages.

[0613] 127. The pharmaceutical composition of embodiment 124 or embodiment 125, wherein the sense strand of the siRNA comprises one or more phosphorothioate linkages.

[0614] 128. The pharmaceutical composition of embodiment 127, wherein the one or more phosphorothioate linkages of the sense strand is about 1, 2, 3, 4, 5, 6, 7, 8, 9, 10, 11, 12, 13, 14, 15, 16, 17, 18, 19, 20, or 21 phosphorothioate linkages.

[0615] 129. The pharmaceutical composition of embodiment 128, wherein the one or more phosphorothioate linkages of the sense strand is about 1, 2, 3, 4, or 5 phosphorothioate linkages.

[0616] 130. The pharmaceutical composition of embodiment 129, wherein the one or more phosphorothioate linkages of the sense strand is about 4 phosphorothioate linkages.

[0617] 131. The pharmaceutical composition of any one of embodiments 127-130, wherein the sense strand comprises a phosphorothioate linkage between the first nucleoside and the second nucleoside of the sense strand, in a 5′ to 3′ direction.

[0618] 132. The pharmaceutical composition of any one of embodiments 127-131, wherein the sense strand comprises a phosphorothioate linkage between the second nucleoside and the third nucleoside of the sense strand, in a 5′ to 3′ direction.

[0619] 133. The pharmaceutical composition of any one of embodiments 127-132, wherein the sense strand comprises a phosphorothioate linkage between the nineteenth nucleoside and the twentieth nucleoside of the sense strand, in a 5′ to 3′ direction.

[0620] 134. The pharmaceutical composition of any one of embodiments 127-133, wherein the sense strand comprises a phosphorothioate linkage between the twentieth nucleoside and the twenty-first nucleoside of the sense strand, in a 5′ to 3′ direction.

[0621] 135. The pharmaceutical composition of any one of embodiments 124-134, wherein the antisense strand of the siRNA comprises one or more phosphorothioate linkages.

[0622] 136. The pharmaceutical composition of embodiment 135, wherein the one or more phosphorothioate linkages of the antisense strand is about 1, 2, 3, 4, 5, 6, 7, 8, 9, 10, 11, 12, 13, 14, 15, 16, 17, 18, 19, 20, or 21 phosphorothioate linkages.

[0623] 137. The pharmaceutical composition of embodiment 136, wherein the one or more phosphorothioate linkages of the antisense strand is about 1, 2, 3, 4, or 5 phosphorothioate linkages.

[0624] 138. The pharmaceutical composition of embodiment 137, wherein the one or more phosphorothioate linkages of the antisense strand is about 4 phosphorothioate linkages.

[0625] 139. The pharmaceutical composition of any one of embodiments 135-138, wherein the antisense strand comprises a phosphorothioate linkage between the first nucleoside and the second nucleoside of the antisense strand, in a 5′ to 3′ direction.

[0626] 140. The pharmaceutical composition of any one of embodiments 135-139, wherein the antisense strand comprises a phosphorothioate linkage between the second nucleoside and the third nucleoside of the antisense strand, in a 5′ to 3′ direction.

[0627] 141. The pharmaceutical composition of any one of embodiments 135-140, wherein the antisense strand comprises a phosphorothioate linkage between the nineteenth nucleoside and the twentieth nucleoside of the sense strand, in a 5′ to 3′ direction.

[0628] 142. The pharmaceutical composition of any one of embodiments 135-141, wherein the antisense strand comprises a phosphorothioate linkage between the twentieth nucleoside and the twenty-first nucleoside of the sense strand, in a 5′ to 3′ direction.

[0629] 143. The pharmaceutical composition of any one of embodiments 113-142, comprising a modified nucleoside.

[0630] 144. The pharmaceutical composition of embodiment 143, wherein the modified nucleoside comprises a locked nucleic acid (LNA), hexitol nucleic acid (HLA), cyclohexene nucleic acid (CeNA), 2′-methoxyethyl, 2′-O-alkyl, 2′-O-allyl, 2′-O-allyl, 2′-fluoro, or 2′-deoxy, or a combination thereof.

[0631] 145. The pharmaceutical composition of embodiment 144, wherein the modified nucleoside comprises a of 2′-O-methyl nucleoside, 2′-deoxyfluoro nucleoside, 2′-O—N-methylacetamido (2′-O-NMA) nucleoside, a 2′-O-dimethylaminoethoxyethyl (2′-O-DMAEOE) nucleoside, 2′-O-aminopropyl (2′-O-AP) nucleoside, or 2′-ara-F, or a combination thereof.

[0632] 146. The pharmaceutical composition of embodiment 144, wherein the modified nucleoside comprises one or more 2′-fluoro modified nucleosides.

[0633] 147. The pharmaceutical composition of embodiment 146, wherein the one or more 2′-fluoro modified nucleosides is about 1, 2, 3, 4, 5, 6, 7, 8, 9, 10, 11, 12, 13, 14, 15, 16, 17, 18, 19, 20, 21, 22, 23, 24, 25, 26, 27, 28, 29, 30, 31, 32, 33, 34, 35, 36, 37, 38, 39, 40, 41, or 42 2′-fluoro modified nucleosides.

[0634] 148. The pharmaceutical composition of embodiment 145 or embodiment 146, wherein the sense strand of the siRNA comprises one or more 2′-fluoro modified nucleosides.

[0635] 149. The pharmaceutical composition of embodiment 148, wherein the one or more 2′-fluoro modified nucleosides of the sense strand is about 1, 2, 3, 4, 5, 6, 7, 8, 9, 10, 11, 12, 13, 14, 15, 16, 17, 18, 19, 20, or 21 2′-fluoro modified nucleosides.

[0636] 150. The pharmaceutical composition of embodiment 149, wherein the one or more 2′-fluoro modified nucleosides of the sense strand is about eleven 2′-fluoro modified nucleosides.

[0637] 151. The pharmaceutical composition of embodiment 149, wherein the one or more 2′-fluoro modified nucleosides of the sense strand is about four 2′-fluoro modified nucleosides.

[0638] 152. The pharmaceutical composition of embodiment 149, wherein the one or more 2′-fluoro modified nucleosides of the sense strand is about three 2′-fluoro modified nucleosides.

[0639] 153. The pharmaceutical composition of any one of embodiments 148-152, wherein the first nucleoside of the sense strand comprises the 2′-fluoro modified nucleoside, in a 5′ to 3′ direction.

[0640] 154. The pharmaceutical composition of any one of embodiments 148-153, wherein the third nucleoside of the sense strand comprises the 2′-fluoro modified nucleoside, in a 5′ to 3′ direction.

[0641] 155. The pharmaceutical composition of any one of embodiments 148-154, wherein the fifth nucleoside of the sense strand comprises the 2′-fluoro modified nucleoside, in a 5′ to 3′ direction.

[0642] 156. The pharmaceutical composition of any one of embodiments 148-155, wherein the seventh nucleoside of the sense strand comprises the 2′-fluoro modified nucleoside, in a 5′ to 3′ direction.

[0643] 157. The pharmaceutical composition of any one of embodiments 148-156, wherein the eighth nucleoside of the sense strand comprises the 2′-fluoro modified nucleoside, in a 5′ to 3′ direction.

[0644] 158. The pharmaceutical composition of any one of embodiments 148-157, wherein the ninth nucleoside of the sense strand comprises the 2′-fluoro modified nucleoside, in a 5′ to 3′ direction.

[0645] 159. The pharmaceutical composition of any one of embodiments 148-158, wherein the eleventh nucleoside of the sense strand comprises the 2′-fluoro modified nucleoside, in a 5′ to 3′ direction.

[0646] 160. The pharmaceutical composition of any one of embodiments 148-159, wherein the thirteenth nucleoside of the sense strand comprises the 2′-fluoro modified nucleoside, in a 5′ to 3′ direction.

[0647] 161. The pharmaceutical composition of any one of embodiments 148-160, wherein the fifteenth nucleoside of the sense strand comprises the 2′-fluoro modified nucleoside, in a 5′ to 3′ direction.

[0648] 162. The pharmaceutical composition of any one of embodiments 148-161, wherein the seventeenth nucleoside of the sense strand comprises the 2′-fluoro modified nucleoside, in a 5′ to 3′ direction.

[0649] 163. The pharmaceutical composition of any one of embodiments 148-162, wherein the nineteenth nucleoside of the sense strand comprises the 2′-fluoro modified nucleoside, in a 5′ to 3′ direction.

[0650] 164. The pharmaceutical composition of any one of embodiments 148-163, wherein the fifth, seventh, and ninth nucleosides of the sense strand comprises the 2′-fluoro modified nucleoside, in a 5′ to 3′ direction.

[0651] 165. The pharmaceutical composition of any one of embodiments 148-164, comprising the pattern fN-Z1-fN-Z2-fN, wherein fN comprises the 2′-fluoro modified nucleoside and Z1 and Z2 are independently a 2′-O-methyl modified nucleoside or a 2′-fluoro modified nucleoside.

[0652] 166. The pharmaceutical composition of embodiment 165, wherein the fN-Z1-fN-Z2-fN corresponds to nucleosides five to nine of the sense strand, in a 5′ to 3′ direction.

[0653] 167. The pharmaceutical composition of any one of embodiments 148-166, wherein the sense strand comprises at least two contiguous 2′-fluoro modified nucleosides.

[0654] 168. The pharmaceutical composition of embodiment 167, wherein the at least two contiguous 2′-fluoro modified nucleosides is two contiguous 2′-fluoro modified nucleosides.

[0655] 169. The pharmaceutical composition of embodiment 168, wherein the at least two contiguous 2′-fluoro modified nucleosides is three contiguous 2′-fluoro modified nucleosides.

[0656] 170. The pharmaceutical composition of any one of embodiments 145-169, wherein the antisense strand of the siRNA comprises one or more 2′-fluoro modified nucleosides.

[0657] 171. The pharmaceutical composition of embodiment 170, wherein the one or more 2′-fluoro modified nucleosides of the antisense strand is about 1, 2, 3, 4, 5, 6, 7, 8, 9, 10, 11, 12, 13, 14, 15, 16, 17, 18, 19, 20, or 21 2′-fluoro modified nucleosides.

[0658] 172. The pharmaceutical composition of embodiment 171, wherein the one or more 2′-fluoro modified nucleosides of the antisense strand is about eight 2′-fluoro modified nucleosides.

[0659] 173. The pharmaceutical composition of embodiment 171, wherein the one or more 2′-fluoro modified nucleosides of the antisense strand is about six 2′-fluoro modified nucleosides.

[0660] 174. The pharmaceutical composition of embodiment 171, wherein the one or more 2′-fluoro modified nucleosides of the antisense strand is about five 2′-fluoro modified nucleosides.

[0661] 175. The pharmaceutical composition of embodiment 171, wherein the one or more 2′-fluoro modified nucleosides of the antisense strand is about four 2′-fluoro modified nucleosides.

[0662] 176. The pharmaceutical composition of any one of embodiments 170-175, wherein the second nucleoside of the antisense strand comprises the 2′-fluoro modified nucleoside, in a 5′ to 3′ direction.

[0663] 177. The pharmaceutical composition of any one of embodiments 170-176, wherein the fourth nucleoside of the antisense strand comprises the 2′-fluoro modified nucleoside, in a 5′ to 3′ direction.

[0664] 178. The pharmaceutical composition of any one of embodiments 170-177, wherein the sixth nucleoside of the antisense strand comprises the 2′-fluoro modified nucleoside, in a 5′ to 3′ direction.

[0665] 179. The pharmaceutical composition of any one of embodiments 170-178, wherein the eighth nucleoside of the antisense strand comprises the 2′-fluoro modified nucleoside, in a 5′ to 3′ direction.

[0666] 180. The pharmaceutical composition of any one of embodiments 170-179, wherein the ninth nucleoside of the antisense strand comprises the 2′-fluoro modified nucleoside, in a 5′ to 3′ direction.

[0667] 181. The pharmaceutical composition of any one of embodiments 170-180, wherein the tenth nucleoside of the antisense strand comprises the 2′-fluoro modified nucleoside, in a 5′ to 3′ direction.

[0668] 182. The pharmaceutical composition of any one of embodiments 170-181, wherein the fourteenth nucleoside of the antisense strand comprises the 2′-fluoro modified nucleoside, in a 5′ to 3′ direction.

[0669] 183. The pharmaceutical composition of any one of embodiments 170-182, wherein the sixteenth nucleoside of the antisense strand comprises the 2′-fluoro modified nucleoside, in a 5′ to 3′ direction.

[0670] 184. The pharmaceutical composition of any one of embodiments 170-183, wherein the eighteenth nucleoside of the antisense strand comprises the 2′-fluoro modified nucleoside, in a 5′ to 3′ direction.

[0671] 185. The pharmaceutical composition of any one of embodiments 170-184, wherein the second and fourteenth nucleosides of the antisense strand comprises the 2′-fluoro modified nucleoside, in a 5′ to 3′ direction.

[0672] 186. The pharmaceutical composition of any one of embodiments 170-185, wherein the second, sixth, fourteenth, and sixteenth nucleosides of the antisense strand comprises the 2′-fluoro modified nucleoside, in a 5′ to 3′ direction.

[0673] 187. The pharmaceutical composition of any one of embodiments 170-186, comprising the pattern Z3-fN-Z4-fN, wherein fN comprises the 2′-fluoro modified nucleoside and Z3 and Z4 are independently a 2′-O-methyl modified nucleoside or a 2′-fluoro modified nucleoside.

[0674] 188. The pharmaceutical composition of embodiment 187, wherein the Z3-fN-Z4-fN corresponds to nucleosides thirteen to sixteen of the antisense strand, in a 5′ to 3′ direction.

[0675] 189. The pharmaceutical composition of any one of embodiments 143-188, wherein the modified nucleoside comprises a 2′-O-alkyl modified nucleoside.

[0676] 190. The pharmaceutical composition of embodiment 189, wherein the 2′-O-alkyl modified nucleoside comprises one or more 2′-O-methyl modified nucleosides.

[0677] 191. The pharmaceutical composition of embodiment 190, wherein the one or more 2′-O-methyl modified nucleosides is about 1, 2, 3, 4, 5, 6, 7, 8, 9, 10, 11, 12, 13, 14, 15, 16, 17, 18, 19, 20, 21, 22, 23, 24, 25, 26, 27, 28, 29, 30, 31, 32, 33, 34, 35, 36, 37, 38, 39, 40, 41, or 42 2′-O-methyl modified nucleosides.

[0678] 192. The pharmaceutical composition of any one of embodiments 189-191, wherein the sense strand of the siRNA comprises one or more 2′-O-methyl modified nucleosides.

[0679] 193. The pharmaceutical composition of embodiment 192, wherein the one or more 2′-O-methyl modified nucleosides of the sense strand is about 1, 2, 3, 4, 5, 6, 7, 8, 9, 10, 11, 12, 13, 14, 15, 16, 17, 18, 19, 20, or 21 2′-O-methyl modified nucleosides.

[0680] 194. The pharmaceutical composition of embodiment 193, wherein the one or more 2′-O-methyl modified nucleosides of the sense strand is about ten 2′-O-methyl modified nucleosides.

[0681] 195. The pharmaceutical composition of embodiment 193, wherein the one or more 2′-O-methyl modified nucleosides of the sense strand is about seventeen 2′-O-methyl modified nucleosides.

[0682] 196. The pharmaceutical composition of embodiment 193, wherein the one or more 2′-O-methyl modified nucleosides of the sense strand is about eighteen 2′-O-methyl modified nucleosides.

[0683] 197. The pharmaceutical composition of any one of embodiments 192-196, wherein the first nucleoside of the sense strand comprises the 2′-O-methyl modified nucleoside, in a 5′ to 3′ direction.

[0684] 198. The pharmaceutical composition of any one of embodiments 192-197, wherein the second nucleoside of the sense strand comprises the 2′-O-methyl modified nucleoside, in a 5′ to 3′ direction.

[0685] 199. The pharmaceutical composition of any one of embodiments 192-198, wherein the third nucleoside of the sense strand comprises the 2′-O-methyl modified nucleoside, in a 5′ to 3′ direction.

[0686] 200. The pharmaceutical composition of any one of embodiments 192-199, wherein the fourth nucleoside of the sense strand comprises the 2′-O-methyl modified nucleoside, in a 5′ to 3′ direction.

[0687] 201. The pharmaceutical composition of any one of embodiments 192-200, wherein the sixth nucleoside of the sense strand comprises the 2′-O-methyl modified nucleoside, in a 5′ to 3′ direction.

[0688] 202. The pharmaceutical composition of any one of embodiments 192-201, wherein the eighth nucleoside of the sense strand comprises the 2′-O-methyl modified nucleoside, in a 5′ to 3′ direction.

[0689] 203. The pharmaceutical composition of any one of embodiments 192-202, wherein the tenth nucleoside of the sense strand comprises the 2′-O-methyl modified nucleoside, in a 5′ to 3′ direction.

[0690] 204. The pharmaceutical composition of any one of embodiments 192-203, wherein the eleventh nucleoside of the sense strand comprises the 2′-O-methyl modified nucleoside, in a 5′ to 3′ direction.

[0691] 205. The pharmaceutical composition of any one of embodiments 192-204, wherein the twelfth nucleoside of the sense strand comprises the 2′-O-methyl modified nucleoside, in a 5′ to 3′ direction.

[0692] 206. The pharmaceutical composition of any one of embodiments 192-205, wherein the thirteenth nucleoside of the sense strand comprises the 2′-O-methyl modified nucleoside, in a 5′ to 3′ direction.

[0693] 207. The pharmaceutical composition of any one of embodiments 192-206, wherein the fourteenth nucleoside of the sense strand comprises the 2′-O-methyl modified nucleoside, in a 5′ to 3′ direction.

[0694] 208. The pharmaceutical composition of any one of embodiments 192-207, wherein the fifteenth nucleoside of the sense strand comprises the 2′-O-methyl modified nucleoside, in a 5′ to 3′ direction.

[0695] 209. The pharmaceutical composition of any one of embodiments 192-208, wherein the sixteenth nucleoside of the sense strand comprises the 2′-O-methyl modified nucleoside, in a 5′ to 3′ direction.

[0696] 210. The pharmaceutical composition of any one of embodiments 192-209, wherein the seventeenth nucleoside of the sense strand comprises the 2′-O-methyl modified nucleoside, in a 5′ to 3′ direction.

[0697] 211. The pharmaceutical composition of any one of embodiments 192-210, wherein the eighteenth nucleoside of the sense strand comprises the 2′-O-methyl modified nucleoside, in a 5′ to 3′ direction.

[0698] 212. The pharmaceutical composition of any one of embodiments 192-211, wherein the nineteenth nucleoside of the sense strand comprises the 2′-O-methyl modified nucleoside, in a 5′ to 3′ direction.

[0699] 213. The pharmaceutical composition of any one of embodiments 192-212, wherein the twentieth nucleoside of the sense strand comprises the 2′-O-methyl modified nucleoside, in a 5′ to 3′ direction.

[0700] 214. The pharmaceutical composition of any one of embodiments 192-213, wherein the twenty-first nucleoside of the sense strand comprises the 2′-O-methyl modified nucleoside, in a 5′ to 3′ direction.

[0701] 215. The pharmaceutical composition of any one of embodiments 192-214, wherein the second, fourth, sixth, tenth, twelfth, fourteenth, and sixteenth, eighteenth, twentieth, and twenty-first nucleosides of the sense strand comprises the 2′-O-methyl modified nucleoside, in a 5′ to 3′ direction.

[0702] 216. The pharmaceutical composition of any one of embodiments 192-215, comprising the pattern mN-Z5-mN-Z6, wherein mN comprises the 2′-O-methyl modified nucleoside and Z5 and Z6 are independently a 2′-O-methyl modified nucleoside or a 2′-fluoro modified nucleoside.

[0703] 217. The pharmaceutical composition of embodiment 216, wherein the mN-Z5-mN-Z6-mN corresponds to nucleosides four to seven of the sense strand, in a 5′ to 3′ direction.

[0704] 218. The pharmaceutical composition of embodiment 216 or embodiment 217, wherein Z5 is the 2′-fluoro modified nucleoside.

[0705] 219. The pharmaceutical composition of embodiment 216 or embodiment 217, wherein Z5 is the 2′-O-methyl modified nucleoside.

[0706] 220. The pharmaceutical composition of any one of embodiments 216-219, wherein Z6 is the 2′-fluoro modified nucleoside.

[0707] 221. The pharmaceutical composition of any one of embodiments 216-219, wherein Z6 is the 2′-O-methyl modified nucleoside.

[0708] 222. The pharmaceutical composition of any one of embodiments 192-221, comprising the pattern mN-Z5-mN-Z6-mN, wherein mN comprises the 2′-O-methyl modified nucleoside and Z5 and Z6 are independently a 2′-O-methyl modified nucleoside or a 2′-fluoro modified nucleoside.

[0709] 223. The pharmaceutical composition of embodiment 222, wherein the mN-Z5-mN-Z6-mN corresponds to nucleosides two to six of the sense strand, in a 5′ to 3′ direction.

[0710] 224. The pharmaceutical composition of embodiment 222, wherein the mN-Z5-mN-Z6-mN corresponds to nucleosides ten to fourteen of the sense strand, in a 5′ to 3′ direction.

[0711] 225. The pharmaceutical composition of embodiment 222, wherein the mN-Z5-mN-Z6-mN corresponds to nucleosides twelve to sixteen of the sense strand, in a 5′ to 3′ direction.

[0712] 226. The pharmaceutical composition of embodiment 222, wherein the mN-Z5-mN-Z6-mN corresponds to nucleosides fourteen to eighteen of the sense strand, in a 5′ to 3′ direction.

[0713] 227. The pharmaceutical composition of embodiment 222, wherein the mN-Z5-mN-Z6-mN corresponds to nucleosides sixteen to twenty of the sense strand, in a 5′ to 3′ direction.

[0714] 228. The pharmaceutical composition of any one of embodiments 192-227, comprising the pattern mN-Z5-mN-Z6-mN-Z7-mN, wherein Z7 is a 2′-O-methyl modified nucleoside or a 2′-fluoro modified nucleoside.

[0715] 229. The pharmaceutical composition of embodiment 228, wherein the mN-Z5-mN-Z6-mN-Z7-mN corresponds to nucleosides ten to sixteen of the sense strand, in a 5′ to 3′ direction.

[0716] 230. The pharmaceutical composition of embodiment 228, wherein the mN-Z5-mN-Z6-mN-Z7-mN corresponds to nucleosides twelve to eighteen of the sense strand, in a 5′ to 3′ direction.

[0717] 231. The pharmaceutical composition of embodiment 228, wherein the mN-Z5-mN-Z6-mN-Z7-mN corresponds to nucleosides fourteen to twenty of the sense strand, in a 5′ to 3′ direction.

[0718] 232. The pharmaceutical composition of any one of embodiments 192-231, comprising the pattern mN-Z5-mN-Z6-mN-Z7-mN-Z8-mN, wherein Z8 is a 2′-O-methyl modified nucleoside or a 2′-fluoro modified nucleoside.

[0719] 233. The pharmaceutical composition of embodiment 232, wherein the mN-Z5-mN-Z6-mN-Z7-mN-Z8-mN corresponds to nucleosides ten to eighteen of the sense strand, in a 5′ to 3′ direction.

[0720] 234. The pharmaceutical composition of embodiment 232, wherein the mN-Z5-mN-Z6-mN-Z7-mN-Z8-mN corresponds to nucleosides twelve to twenty of the sense strand, in a 5′ to 3′ direction.

[0721] 235. The pharmaceutical composition of any one of embodiments 192-234, comprising the pattern mN-Z5-mN-Z6-mN-Z7-mN-Z8-mN-Z9-mN, wherein Z9 is a 2′-O-methyl modified nucleoside or a 2′-fluoro modified nucleoside.

[0722] 236. The pharmaceutical composition of embodiment 235, wherein the mN-Z5-mN-Z6-mN-Z7-mN-Z8-mN-Z9-mN corresponds to nucleosides ten to twenty of the sense strand, in a 5′ to 3′ direction.

[0723] 237. The pharmaceutical composition of any one of embodiments 192-236, wherein the sense strand comprises at least two contiguous 2′-O-methyl modified nucleosides.

[0724] 238. The pharmaceutical composition of embodiment 237, wherein the at least two contiguous 2′-O-methyl modified nucleosides is three contiguous 2′-O-methyl modified nucleosides.

[0725] 239. The pharmaceutical composition of embodiment 237, wherein the at least two contiguous 2′-O-methyl modified nucleosides is four contiguous 2′-O-methyl modified nucleosides.

[0726] 240. The pharmaceutical composition of embodiment 237, wherein the at least two contiguous 2′-O-methyl modified nucleosides is five contiguous 2′-O-methyl modified nucleosides.

[0727] 241. The pharmaceutical composition of embodiment 237, wherein the at least two contiguous 2′-O-methyl modified nucleosides is six contiguous 2′-O-methyl modified nucleosides.

[0728] 242. The pharmaceutical composition of embodiment 237, wherein the at least two contiguous 2′-O-methyl modified nucleosides is seven contiguous 2′-O-methyl modified nucleosides.

[0729] 243. The pharmaceutical composition of embodiment 237, wherein the at least two contiguous 2′-O-methyl modified nucleosides is eight contiguous 2′-O-methyl modified nucleosides.

[0730] 244. The pharmaceutical composition of embodiment 237, wherein the at least two contiguous 2′-O-methyl modified nucleosides is nine contiguous 2′-O-methyl modified nucleosides.

[0731] 245. The pharmaceutical composition of embodiment 237, wherein the at least two contiguous 2′-O-methyl modified nucleosides is ten contiguous 2′-O-methyl modified nucleosides.

[0732] 246. The pharmaceutical composition of embodiment 237, wherein the at least two contiguous 2′-O-methyl modified nucleosides is eleven contiguous 2′-O-methyl modified nucleosides.

[0733] 247. The pharmaceutical composition of embodiment 237, wherein the at least two contiguous 2′-O-methyl modified nucleosides is twelve contiguous 2′-O-methyl modified nucleosides.

[0734] 248. The pharmaceutical composition of any one of embodiments 189-247, wherein the antisense strand of the siRNA comprises one or more 2′-O-methyl modified nucleosides.

[0735] 249. The pharmaceutical composition of embodiment 248, wherein the one or more 2′-O-methyl modified nucleosides of the antisense strand is about 1, 2, 3, 4, 5, 6, 7, 8, 9, 10, 11, 12, 13, 14, 15, 16, 17, 18, 19, 20, or 21 2′-O-methyl modified nucleosides.

[0736] 250. The pharmaceutical composition of embodiment 249, wherein the one or more 2′-O-methyl modified nucleosides of the antisense strand is about thirteen 2′-O-methyl modified nucleosides.

[0737] 251. The pharmaceutical composition of embodiment 249, wherein the one or more 2′-O-methyl modified nucleosides of the antisense strand is about fifteen 2′-O-methyl modified nucleosides.

[0738] 252. The pharmaceutical composition of embodiment 249, wherein the one or more 2′-O-methyl modified nucleosides of the antisense strand is about seventeen 2′-O-methyl modified nucleosides.

[0739] 253. The pharmaceutical composition of any one of embodiments 249-252, wherein the first nucleoside of the antisense strand comprises the 2′-O-methyl modified nucleoside, in a 5′ to 3′ direction.

[0740] 254. The pharmaceutical composition of any one of embodiments 249-253, wherein the third nucleoside of the antisense strand comprises the 2′-O-methyl modified nucleoside, in a 5′ to 3′ direction.

[0741] 255. The pharmaceutical composition of any one of embodiments 249-254, wherein the fourth nucleoside of the antisense strand comprises the 2′-O-methyl modified nucleoside, in a 5′ to 3′ direction.

[0742] 256. The pharmaceutical composition of any one of embodiments 249-255, wherein the fifth nucleoside of the antisense strand comprises the 2′-O-methyl modified nucleoside, in a 5′ to 3′ direction.

[0743] 257. The pharmaceutical composition of any one of embodiments 249-256, wherein the seventh nucleoside of the antisense strand comprises the 2′-O-methyl modified nucleoside, in a 5′ to 3′ direction.

[0744] 258. The pharmaceutical composition of any one of embodiments 249-257, wherein the eighth nucleoside of the antisense strand comprises the 2′-O-methyl modified nucleoside, in a 5′ to 3′ direction.

[0745] 259. The pharmaceutical composition of any one of embodiments 249-258, wherein the ninth nucleoside of the antisense strand comprises the 2′-O-methyl modified nucleoside, in a 5′ to 3′ direction.

[0746] 260. The pharmaceutical composition of any one of embodiments 249-259, wherein the tenth nucleoside of the antisense strand comprises the 2′-O-methyl modified nucleoside, in a 5′ to 3′ direction.

[0747] 261. The pharmaceutical composition of any one of embodiments 249-260, wherein the eleventh nucleoside of the antisense strand comprises the 2′-O-methyl modified nucleoside, in a 5′ to 3′ direction.

[0748] 262. The pharmaceutical composition of any one of embodiments 249-261, wherein the twelfth nucleoside of the antisense strand comprises the 2′-O-methyl modified nucleoside, in a 5′ to 3′ direction.

[0749] 263. The pharmaceutical composition of any one of embodiments 249-262, wherein the thirteenth nucleoside of the antisense strand comprises the 2′-O-methyl modified nucleoside, in a 5′ to 3′ direction.

[0750] 264. The pharmaceutical composition of any one of embodiments 249-263, wherein the fifteenth nucleoside of the antisense strand comprises the 2′-O-methyl modified nucleoside, in a 5′ to 3′ direction.

[0751] 265. The pharmaceutical composition of any one of embodiments 249-264, wherein the seventeenth nucleoside of the antisense strand comprises the 2′-O-methyl modified nucleoside, in a 5′ to 3′ direction.

[0752] 266. The pharmaceutical composition of any one of embodiments 249-265, wherein the eighteenth nucleoside of the antisense strand comprises the 2′-O-methyl modified nucleoside, in a 5′ to 3′ direction.

[0753] 267. The pharmaceutical composition of any one of embodiments 249-266, wherein the nineteenth nucleoside of the antisense strand comprises the 2′-O-methyl modified nucleoside, in a 5′ to 3′ direction.

[0754] 268. The pharmaceutical composition of any one of embodiments 249-267, wherein the twentieth nucleoside of the antisense strand comprises the 2′-O-methyl modified nucleoside, in a 5′ to 3′ direction.

[0755] 269. The pharmaceutical composition of any one of embodiments 249-268, wherein the twenty-first nucleoside of the antisense strand comprises the 2′-O-methyl modified nucleoside, in a 5′ to 3′ direction.

[0756] 270. The pharmaceutical composition of any one of embodiments 249-269, wherein the first, third, fifth, seventh, eleventh, twelfth, thirteenth, fifteenth, seventeenth, nineteenth, twentieth, and twenty-first nucleosides of the antisense strand comprises the 2′-O-methyl modified nucleoside, in a 5′ to 3′ direction.

[0757] 271. The pharmaceutical composition of any one of embodiments 249-270, wherein the antisense strand comprises at least two contiguous 2′-O-methyl modified nucleosides.

[0758] 272. The pharmaceutical composition of embodiment 271, wherein the at least two contiguous 2′-O-methyl modified nucleosides is three contiguous 2′-O-methyl modified nucleosides.

[0759] 273. The pharmaceutical composition of embodiment 271, wherein the at least two contiguous 2′-O-methyl modified nucleosides is four contiguous 2′-O-methyl modified nucleosides.

[0760] 274. The pharmaceutical composition of embodiment 271, wherein the at least two contiguous 2′-O-methyl modified nucleosides is five contiguous 2′-O-methyl modified nucleosides.

[0761] 275. The pharmaceutical composition of embodiment 271, wherein the at least two contiguous 2′-O-methyl modified nucleosides is six contiguous 2′-O-methyl modified nucleosides.

[0762] 276. The pharmaceutical composition of embodiment 271, wherein the at least two contiguous 2′-O-methyl modified nucleosides is seven contiguous 2′-O-methyl modified nucleosides.

[0763] 277. The pharmaceutical composition of any one of embodiments 248-276, wherein the antisense strand comprises a first sequence comprising at least two contiguous 2′-O-methyl modified nucleosides and a second sequence comprising at least two contiguous 2′-O-methyl modified nucleosides.

[0764] 278. The pharmaceutical composition of embodiment 277, wherein the first sequence comprises at least three contiguous 2′-O-methyl modified nucleosides, and the second sequence comprises at least three contiguous 2′-O-methyl modified nucleosides.

[0765] 279. The pharmaceutical composition of embodiment 277, wherein the first sequence comprises three contiguous 2′-O-methyl modified nucleosides, and the second sequence comprises three contiguous 2′-O-methyl modified nucleosides.

[0766] 280. The pharmaceutical composition of embodiment 277, wherein the first sequence comprises four contiguous 2′-O-methyl modified nucleosides, and the second sequence comprises five contiguous 2′-O-methyl modified nucleosides.

[0767] 281. The pharmaceutical composition of embodiment 277, wherein the first sequence comprises seven contiguous 2′-O-methyl modified nucleosides, and the second sequence comprises five contiguous 2′-O-methyl modified nucleosides.

[0768] 282. The pharmaceutical composition of embodiment 277, wherein the first sequence comprises at least four contiguous 2′-O-methyl modified nucleosides.

[0769] 283. The pharmaceutical composition of embodiment 277, wherein the first sequence comprises at least five contiguous 2′-O-methyl modified nucleosides.

[0770] 284. The pharmaceutical composition of embodiment 277, wherein the first sequence comprises at least six contiguous 2′-O-methyl modified nucleosides.

[0771] 285. The pharmaceutical composition of embodiment 277, wherein the first sequence comprises at least seven contiguous 2′-O-methyl modified nucleosides.

[0772] 286. The pharmaceutical composition of any one of embodiments 282-285, wherein the second sequence comprises at least four contiguous 2′-O-methyl modified nucleosides.

[0773] 287. The pharmaceutical composition of any one of embodiments 282-285, wherein the second sequence comprises at least five contiguous 2′-O-methyl modified nucleosides.

[0774] 288. The pharmaceutical composition of any one of embodiments 282-285, wherein the second sequence comprises at least six contiguous 2′-O-methyl modified nucleosides.

[0775] 289. The pharmaceutical composition of any one of embodiments 282-285, wherein the second sequence comprises at least seven contiguous 2′-O-methyl modified nucleosides.

[0776] 290. The pharmaceutical composition of any one of embodiments 113-289, wherein the sense strand comprises a ribose.

[0777] 291. The pharmaceutical composition of embodiment 290, wherein the sense strand comprises about 1, 2, 3, 4, 5, 6, 7, 8, 9, 10, 11, 12, 13, 14, 15, 16, 17, 18, 19, 20, or 21 ribose.

[0778] 292. The pharmaceutical composition of embodiment 290 or embodiment 291, wherein the first nucleoside of the sense strand comprises the ribose, in a 5′ to 3′ direction.

[0779] 293. The pharmaceutical composition of any one of embodiments 290-292, wherein the second nucleoside of the sense strand comprises the ribose, in a 5′ to 3′ direction.

[0780] 294. The pharmaceutical composition of any one of embodiments 290-293, wherein the third nucleoside of the sense strand comprises the ribose, in a 5′ to 3′ direction.

[0781] 295. The pharmaceutical composition of any one of embodiments 290-294, wherein the fourth nucleoside of the sense strand comprises the ribose, in a 5′ to 3′ direction.

[0782] 296. The pharmaceutical composition of any one of embodiments 290-295, wherein the fifth nucleoside of the sense strand comprises the ribose, in a 5′ to 3′ direction.

[0783] 297. The pharmaceutical composition of any one of embodiments 290-296, wherein the sixth nucleoside of the sense strand comprises the ribose, in a 5′ to 3′ direction.

[0784] 298. The pharmaceutical composition of any one of embodiments 290-297, wherein the seventh nucleoside of the sense strand comprises the ribose, in a 5′ to 3′ direction.

[0785] 299. The pharmaceutical composition of any one of embodiments 290-298, wherein the eighth nucleoside of the sense strand comprises the ribose, in a 5′ to 3′ direction.

[0786] 300. The pharmaceutical composition of any one of embodiments 290-299, wherein the ninth nucleoside of the sense strand comprises the ribose, in a 5′ to 3′ direction.

[0787] 301. The pharmaceutical composition of any one of embodiments 290-300, wherein the tenth nucleoside of the sense strand comprises the ribose, in a 5′ to 3′ direction.

[0788] 302. The pharmaceutical composition of any one of embodiments 290-301, wherein the eleventh nucleoside of the sense strand comprises the ribose, in a 5′ to 3′ direction.

[0789] 303. The pharmaceutical composition of any one of embodiments 290-302, wherein the twelfth nucleoside of the sense strand comprises the ribose, in a 5′ to 3′ direction.

[0790] 304. The pharmaceutical composition of any one of embodiments 290-303, wherein the thirteenth nucleoside of the sense strand comprises the ribose, in a 5′ to 3′ direction.

[0791] 305. The pharmaceutical composition of any one of embodiments 290-304, wherein the fourteenth nucleoside of the sense strand comprises the ribose, in a 5′ to 3′ direction.

[0792] 306. The pharmaceutical composition of any one of embodiments 290-305, wherein the fifteenth nucleoside of the sense strand comprises the ribose, in a 5′ to 3′ direction.

[0793] 307. The pharmaceutical composition of any one of embodiments 290-306, wherein the sixteenth nucleoside of the sense strand comprises the ribose, in a 5′ to 3′ direction.

[0794] 308. The pharmaceutical composition of any one of embodiments 290-307, wherein the seventeenth nucleoside of the sense strand comprises the ribose, in a 5′ to 3′ direction.

[0795] 309. The pharmaceutical composition of any one of embodiments 290-308, wherein the eighteenth nucleoside of the sense strand comprises the ribose, in a 5′ to 3′ direction.

[0796] 310. The pharmaceutical composition of any one of embodiments 290-309, wherein the nineteenth nucleoside of the sense strand comprises the ribose, in a 5′ to 3′ direction.

[0797] 311. The pharmaceutical composition of any one of embodiments 290-310, wherein the twentieth nucleoside of the sense strand comprises the ribose, in a 5′ to 3′ direction.

[0798] 312. The pharmaceutical composition of any one of embodiments 290-311, wherein the twenty-first nucleoside of the sense strand comprises the ribose, in a 5′ to 3′ direction.

[0799] 313. The pharmaceutical composition of any one of embodiments 113-312, wherein the antisense strand comprises a ribose.

[0800] 314. The pharmaceutical composition of embodiment 313, wherein the antisense strand comprises about 1, 2, 3, 4, 5, 6, 7, 8, 9, 10, 11, 12, 13, 14, 15, 16, 17, 18, 19, 20, or 21 ribose.

[0801] 315. The pharmaceutical composition of embodiment 313 or embodiment 314, wherein the first nucleoside of the antisense strand comprises the ribose, in a 5′ to 3′ direction.

[0802] 316. The pharmaceutical composition of any one of embodiments 313-315, wherein the second nucleoside of the antisense strand comprises the ribose, in a 5′ to 3′ direction.

[0803] 317. The pharmaceutical composition of any one of embodiments 313-316, wherein the third nucleoside of the antisense strand comprises the ribose, in a 5′ to 3′ direction.

[0804] 318. The pharmaceutical composition of any one of embodiments 313-317, wherein the fourth nucleoside of the antisense strand comprises the ribose, in a 5′ to 3′ direction.

[0805] 319. The pharmaceutical composition of any one of embodiments 313-318, wherein the fifth nucleoside of the antisense strand comprises the ribose, in a 5′ to 3′ direction.

[0806] 320. The pharmaceutical composition of any one of embodiments 313-319, wherein the sixth nucleoside of the antisense strand comprises the ribose, in a 5′ to 3′ direction.

[0807] 321. The pharmaceutical composition of any one of embodiments 313-320, wherein the seventh nucleoside of the antisense strand comprises the ribose, in a 5′ to 3′ direction.

[0808] 322. The pharmaceutical composition of any one of embodiments 313-321, wherein the eighth nucleoside of the antisense strand comprises the ribose, in a 5′ to 3′ direction.

[0809] 323. The pharmaceutical composition of any one of embodiments 313-322, wherein the ninth nucleoside of the antisense strand comprises the ribose, in a 5′ to 3′ direction.

[0810] 324. The pharmaceutical composition of any one of embodiments 313-323, wherein the tenth nucleoside of the sense antisense comprises the ribose, in a 5′ to 3′ direction.

[0811] 325. The pharmaceutical composition of any one of embodiments 313-324, wherein the eleventh nucleoside of the antisense strand comprises the ribose, in a 5′ to 3′ direction.

[0812] 326. The pharmaceutical composition of any one of embodiments 313-325, wherein the twelfth nucleoside of the antisense strand comprises the ribose, in a 5′ to 3′ direction.

[0813] 327. The pharmaceutical composition of any one of embodiments 313-326, wherein the thirteenth nucleoside of the antisense strand comprises the ribose, in a 5′ to 3′ direction.

[0814] 328. The pharmaceutical composition of any one of embodiments 313-327, wherein the fourteenth nucleoside of the antisense strand comprises the ribose, in a 5′ to 3′ direction.

[0815] 329. The pharmaceutical composition of any one of embodiments 313-328, wherein the fifteenth nucleoside of the antisense strand comprises the ribose, in a 5′ to 3′ direction.

[0816] 330. The pharmaceutical composition of any one of embodiments 313-329, wherein the sixteenth nucleoside of the antisense strand comprises the ribose, in a 5′ to 3′ direction.

[0817] 331. The pharmaceutical composition of any one of embodiments 313-330, wherein the seventeenth nucleoside of the antisense strand comprises the ribose, in a 5′ to 3′ direction.

[0818] 332. The pharmaceutical composition of any one of embodiments 313-331, wherein the eighteenth nucleoside of the antisense strand comprises the ribose, in a 5′ to 3′ direction.

[0819] 333. The pharmaceutical composition of any one of embodiments 313-332, wherein the nineteenth nucleoside of the antisense strand comprises the ribose, in a 5′ to 3′ direction.

[0820] 334. The pharmaceutical composition of any one of embodiments 313-333, wherein the twentieth nucleoside of the antisense strand comprises the ribose, in a 5′ to 3′ direction.

[0821] 335. The pharmaceutical composition of any one of embodiments 313-334, wherein the twenty-first nucleoside of the antisense strand comprises the ribose, in a 5′ to 3′ direction.

[0822] 336. The pharmaceutical composition of any one of embodiments 113-335, further comprising a lipid attached at either 3′ or 5′ terminus.

[0823] 337. The pharmaceutical composition of embodiment 336, wherein the lipid comprises cholesterol, myristoyl, palmitoyl, stearoyl, lithocholoyl, docosanoyl, docosahexaenoyl, myristyl, palmityl stearyl, α-tocopherol, or a combination thereof.

[0824] 338. The pharmaceutical composition of embodiment 336 or embodiment 337, wherein the lipid comprises a first lipid on the sense strand and a second lipid on the antisense strand.

[0825] 339. The pharmaceutical composition of any one of embodiments 336-338, wherein the lipid is positioned on the sense strand.

[0826] 340. The pharmaceutical composition of embodiment 339, wherein the lipid is positioned at the 5′ end of the sense strand.

[0827] 341. The pharmaceutical composition of embodiment 339, wherein the lipid is positioned at the 3′ end of the sense strand.

[0828] 342. The pharmaceutical composition of any one of embodiments 336-341, wherein the lipid is positioned on the antisense strand.

[0829] 343. The pharmaceutical composition of embodiment 342, wherein the lipid is positioned at the 5′ end of the antisense strand.

[0830] 344. The pharmaceutical composition of embodiment 342, wherein the lipid is positioned at the 3′ end of the antisense strand.

[0831] 345. The pharmaceutical composition of any one of embodiments 113-344, wherein the sense strand and the antisense strand form a double-stranded RNA duplex.

[0832] 346. The pharmaceutical composition of embodiment 345, wherein the double-stranded RNA duplex comprises from about 14 to about 30 nucleosides.

[0833] 347. The pharmaceutical composition of embodiment 346, wherein the double-stranded RNA duplex comprises from about 17 to about 30 nucleosides.

[0834] 348. The pharmaceutical composition of embodiment 347, wherein the double-stranded RNA duplex comprises about 21 nucleosides.

[0835] 349. The pharmaceutical composition of any one of embodiments 345-348, wherein the double-stranded RNA duplex comprises at least one base pair.

[0836] 350. The pharmaceutical composition of embodiment 349, wherein the first base pair of the double-stranded RNA duplex is an AU base pair.

[0837] 351. The pharmaceutical composition of any one of embodiments 113-350, wherein the sense strand comprises pattern 1S: 5′ fN s mN s fN-mN-fN-mN-fN-fN-fN-mN-fN-mN-fN-mN-fN-mN-fN-mN-fN s mN s mN 3′ (SEQ ID NO: 11381), wherein “fN” is a 2′-fluoro-modified nucleoside, “mN” is a 2′-O-methyl modified nucleoside, “-” is a phosphodiester, and “s” is a phosphorothioate.

[0838] 352. The pharmaceutical composition of any one of embodiments 113-350, wherein the sense strand comprises pattern 2S: 5′ mN s mN s mN-mN-fN-mN-fN-fN-fN-mN-mN-mN-mN-mN-mN-mN-mN-mN-mN s mN s mN 3′ (SEQ ID NO: 11382), wherein “fN” is a 2′-fluoro-modified nucleoside, “mN” is a 2′-O-methyl modified nucleoside, “-” is a phosphodiester, and “s” is a phosphorothioate.

[0839] 353. The pharmaceutical composition of any one of embodiments 113-350, wherein the sense strand comprises pattern 3S: 5′ mN s mN s mN-mN-fN-mN-fN-mN-fN-mN-mN-mN-mN-mN-mN-mN-mN-mN-mN s mN s mN 3′ (SEQ ID NO: 11383), wherein “fN” is a 2′-fluoro-modified nucleoside, “mN” is a 2′-O-methyl modified nucleoside, “-” is a phosphodiester, and “s” is a phosphorothioate.

[0840] 354. The pharmaceutical composition of any one of embodiments 113-350, wherein the sense strand comprises pattern 4S: 5′ fN s mN s fN-mN-fN-mN-fN-fN-fN-mN-fN-mN-fN-mN-fN-mN-fN-mN-fN s mN s mN—N-Lipid 3′ (SEQ ID NO: 11384), wherein “fN” is a 2′-fluoro-modified nucleoside, “mN” is a 2′-O-methyl modified nucleoside, “-” is a phosphodiester, “s” is a phosphorothioate, and N comprises one or more nucleosides.

[0841] 355. The pharmaceutical composition of embodiment 354, wherein the one or more nucleosides is three nucleosides.

[0842] 356. The pharmaceutical composition of embodiment 354 or 355, wherein each of the one or more nucleosides independently comprise a ribose or deoxyribose.

[0843] 357. The pharmaceutical composition of any one of embodiments 113-350, wherein the sense strand comprises pattern 5S: 5′ mN s mN s mN-mN-fN-mN-fN-fN-fN-mN-mN-mN-mN-mN-mN-mN-mN-mN-mN s mN s mN—N-Lipid 3′ (SEQ ID NO: 11385), wherein “fN” is a 2′-fluoro-modified nucleoside, “mN” is a 2′-O-methyl modified nucleoside, “-” is a phosphodiester, “s” is a phosphorothioate, and N comprises one or more nucleosides.

[0844] 358. The pharmaceutical composition of embodiment 357, wherein the one or more nucleosides is three nucleosides.

[0845] 359. The pharmaceutical composition of embodiment 357 or 358, wherein each of the one or more nucleosides independently comprise a ribose or deoxyribose.

[0846] 360. The pharmaceutical composition of any one of embodiments 113-359, wherein the antisense strand comprises pattern 1AS: 5′ mN s fN s mN-fN-mN-fN-mN-fN-mN-fN-mN-mN-mN-fN-mN-fN-mN-fN-mN s mN s mN 3′ (SEQ ID NO: 11386), wherein “fN” is a 2′-fluoro-modified nucleoside, “mN” is a 2′-O-methyl modified nucleoside, “-” is a phosphodiester, and “s” is a phosphorothioate.

[0847] 361. The pharmaceutical composition of any one of embodiments 113-359, wherein the antisense strand comprises pattern 2AS: 5′ mN s fN s mN-mN-mN-fN-mN-fN-fN-mN-mN-mN-mN-fN-mN-fN-mN-mN-mN s mN s mN 3′ (SEQ ID NO: 11387), wherein “fN” is a 2′-fluoro-modified nucleoside, “mN” is a 2′-O-methyl modified nucleoside, “-” is a phosphodiester, and “s” is a phosphorothioate.

[0848] 362. The pharmaceutical composition of any one of embodiments 113-359, wherein the antisense strand comprises pattern 3AS: 5′ mN s fN s mN-mN-mN-fN-mN-mN-mN-mN-mN-mN-mN-fN-mN-fN-mN-mN-mN s mN s mN 3′ (SEQ ID NO: 11388), wherein “fN” is a 2′-fluoro-modified nucleoside, “mN” is a 2′-O-methyl modified nucleoside, “-” is a phosphodiester, and “s” is a phosphorothioate.

[0849] 363. The pharmaceutical composition of any one of embodiments 113-359, wherein the antisense strand comprises pattern 4AS: 5′ mN s fN s mN-fN-mN-fN-mN-mN-mN-mN-mN-mN-mN-fN-mN-fN-mN-mN-mN s mN s mN 3′ (SEQ ID NO: 11389), wherein “fN” is a 2′-fluoro-modified nucleoside, “mN” is a 2′-O-methyl modified nucleoside, “-” is a phosphodiester, and “s” is a phosphorothioate.

[0850] 364. The pharmaceutical composition of any one of embodiments 113-350, wherein the sense strand comprises pattern 1S and the antisense strand comprises pattern 1AS.

[0851] 365. The pharmaceutical composition of any one of embodiments 113-350, wherein the sense strand comprises pattern 2S and the antisense strand comprises pattern 2AS.

[0852] 366. The pharmaceutical composition of any one of embodiments 113-350, wherein the sense strand comprises pattern 3S and the antisense strand comprises pattern 3AS.

[0853] 367. The pharmaceutical composition of any one of embodiments 113-350, wherein the sense strand comprises pattern 4S and the antisense strand comprises pattern 4AS.

[0854] 368. A method of treating an eye disease or disorder comprising administering to the eye of a patient in need thereof a short interfering nucleic acid molecule (siRNA) that targets a portion of mRNA encoding ANGPTL7, wherein the siRNA comprises a double-stranded nucleic acid region comprising a sense strand and an antisense strand, and wherein there is greater than 90% sequence identity or greater than 90% sequence complementarity between said double-stranded nucleic acid region of siRNA and the portion of mRNA encoding ANGPTL7 that is targeted by the siRNA.

[0855] 369. The method of embodiment 368, wherein the eye disease or disorder is characterized by increased intraocular pressure.

[0856] 370. The method of embodiment 368 or embodiment 369, wherein the siRNA is administered to the eye of the patient in an effective amount that reduces IOP in the eye of the patient.

[0857] 371. The method of embodiment 370, wherein the siRNA molecule reduces intraocular pressure by at least 5%, at least 10%, at least 15%, at least 20%, at least 25%, at least 30% relative to a pre-treatment value of intraocular pressure in the eye of the patient.

[0858] 372. The method of any of embodiments 368-371, wherein the siRNA is formulated for topical administration to the eye.

[0859] 373. The method of any of embodiments 368-372, wherein the eye disease or disorder comprises glaucoma.

[0860] 374. The method of embodiment 373, wherein the glaucoma is selected from the group consisting of optic nerve damage comprises primary open-angle glaucoma, primary angle-closure glaucoma, normal-tension glaucoma, pigmentary glaucoma, exfoliation glaucoma, juvenile glaucoma, congenital glaucoma, inflammatory glaucoma, phacogenic glaucoma, glaucoma secondary to intraocular hemorrhage, traumatic glaucoma, neovascular glaucoma, drug-induced glaucoma, toxic glaucoma, and absolute glaucoma.

[0861] 375. The method of embodiment 374, wherein the eye disease or disorder is selected from the group consisting a disease or disorder associated with optic nerve damage, a disease or disorder associated with intraocular pressure, a degenerative retinal disease or disorder, an inflammatory eye disease or disorder, an allergic eye disease or disorder. 376. The method of any of embodiments 368-375, wherein the siRNA has a length of 17-30 nucleotide pairs.

[0862] 377. The method of any of embodiments 368-376, wherein the sense strand and antisense strand each have 17-30 nucleotides.

[0863] 378. The method of any of embodiments 368-377, wherein the sense strand comprises a sequence at least about 80%, 85%, 90%, 95%, or 100% identical to a sequence selected from SEQ ID NOS: 1-4412.

[0864] 379. The method of any of embodiments 368-378, wherein the antisense strand comprises a sequence at least about 80%, 85%, 90%, 95%, or 100% identical to the reverse complement of the sense strand.

[0865] 380. The method of any of embodiments 368-379, wherein the antisense strand comprises a sequence at least about 80%, 85%, 90%, 95%, or 100% identical to a sequence selected from SEQ ID NOS: 1-4412.

[0866] 381. The method of any of embodiments 368-380, wherein the sequence of the sense strand comprises SEQ ID NO: 11089 and the sequence of the antisense strand comprises SEQ ID NO: 11090.

[0867] 382. The method of any of embodiments 368-381, comprising a modified internucleoside linkage.

[0868] 383. The method of embodiment 382, wherein the modified internucleoside linkage comprises alkylphosphonate, phosphorothioate, methylphosphonate, phosphorodithioate, alkylphosphonothioate, phosphoramidate, carbamate, carbonate, phosphate triester, acetamidate, or carboxymethyl ester, or a combination thereof.

[0869] 384. The method of embodiment 383, wherein the modified internucleoside linkage comprises one or more phosphorothioate linkages.

[0870] 385. The method of embodiment 384, wherein the one or more phosphorothioate linkages is about 1, 2, 3, 4, 5, 6, 7, 8, 9, 10, 11, 12, 13, 14, 15, 16, 17, 18, 19, 20, 21, 22, 23, 24, 25, 26, 27, 28, 29, 30, 31, 32, 33, 34, 35, 36, 37, 38, 39, 40, 41, or 42 phosphorothioate linkages.

[0871] 386. The method of embodiment 384 or embodiment 385, wherein the sense strand of the siRNA comprises one or more phosphorothioate linkages.

[0872] 387. The method of embodiment 386, wherein the one or more phosphorothioate linkages of the sense strand is about 1, 2, 3, 4, 5, 6, 7, 8, 9, 10, 11, 12, 13, 14, 15, 16, 17, 18, 19, 20, or 21 phosphorothioate linkages.

[0873] 388. The method of embodiment 387, wherein the one or more phosphorothioate linkages of the sense strand is about 1, 2, 3, 4, or 5 phosphorothioate linkages.

[0874] 389. The method of embodiment 388, wherein the one or more phosphorothioate linkages of the sense strand is about 4 phosphorothioate linkages.

[0875] 390. The method of any one of embodiments 382-389, wherein the sense strand comprises a phosphorothioate linkage between the first nucleoside and the second nucleoside of the sense strand, in a 5′ to 3′ direction.

[0876] 391. The method of any one of embodiments 382-390, wherein the sense strand comprises a phosphorothioate linkage between the second nucleoside and the third nucleoside of the sense strand, in a 5′ to 3′ direction.

[0877] 392. The method of any one of embodiments 382-391, wherein the sense strand comprises a phosphorothioate linkage between the nineteenth nucleoside and the twentieth nucleoside of the sense strand, in a 5′ to 3′ direction.

[0878] 393. The method of any one of embodiments 382-392, wherein the sense strand comprises a phosphorothioate linkage between the twentieth nucleoside and the twenty-first nucleoside of the sense strand, in a 5′ to 3′ direction.

[0879] 394. The method of any one of embodiments 384-393, wherein the antisense strand of the siRNA comprises one or more phosphorothioate linkages.

[0880] 395. The method of embodiment 394, wherein the one or more phosphorothioate linkages of the antisense strand is about 1, 2, 3, 4, 5, 6, 7, 8, 9, 10, 11, 12, 13, 14, 15, 16, 17, 18, 19, 20, or 21 phosphorothioate linkages.

[0881] 396. The method of embodiment 395, wherein the one or more phosphorothioate linkages of the antisense strand is about 1, 2, 3, 4, or 5 phosphorothioate linkages.

[0882] 397. The method of embodiment 396, wherein the one or more phosphorothioate linkages of the antisense strand is about 4 phosphorothioate linkages.

[0883] 398. The method of any one of embodiments 394-397, wherein the antisense strand comprises a phosphorothioate linkage between the first nucleoside and the second nucleoside of the antisense strand, in a 5′ to 3′ direction.

[0884] 399. The method of any one of embodiments 394-398, wherein the antisense strand comprises a phosphorothioate linkage between the second nucleoside and the third nucleoside of the antisense strand, in a 5′ to 3′ direction.

[0885] 400. The method of any one of embodiments 394-399, wherein the antisense strand comprises a phosphorothioate linkage between the nineteenth nucleoside and the twentieth nucleoside of the sense strand, in a 5′ to 3′ direction.

[0886] 401. The method of any one of embodiments 394-400, wherein the antisense strand comprises a phosphorothioate linkage between the twentieth nucleoside and the twenty-first nucleoside of the sense strand, in a 5′ to 3′ direction.

[0887] 402. The method of any one of embodiments 368-401, comprising a modified nucleoside.

[0888] 403. The method of embodiment 402, wherein the modified nucleoside comprises a locked nucleic acid (LNA), hexitol nucleic acid (HLA), cyclohexene nucleic acid (CeNA), 2′-methoxyethyl, 2′-O-alkyl, 2′-O-allyl, 2′-O-allyl, 2′-fluoro, or 2′-deoxy, or a combination thereof.

[0889] 404. The method of embodiment 403, wherein the modified nucleoside comprises a of 2′-O-methyl nucleoside, 2′-deoxyfluoro nucleoside, 2′-O—N-methylacetamido (2′-O-NMA) nucleoside, a 2′-O-dimethylaminoethoxyethyl (2′-O-DMAEOE) nucleoside, 2′-O-aminopropyl (2′-O-AP) nucleoside, or 2′-ara-F, or a combination thereof.

[0890] 405. The method of embodiment 403, wherein the modified nucleoside comprises one or more 2′fluoro modified nucleosides.

[0891] 406. The method of embodiment 405, wherein the one or more 2′-fluoro modified nucleosides is about 1, 2, 3, 4, 5, 6, 7, 8, 9, 10, 11, 12, 13, 14, 15, 16, 17, 18, 19, 20, 21, 22, 23, 24, 25, 26, 27, 28, 29, 30, 31, 32, 33, 34, 35, 36, 37, 38, 39, 40, 41, or 42 2′-fluoro modified nucleosides.

[0892] 407. The method of embodiment 405 or embodiment 406, wherein the sense strand of the siRNA comprises one or more 2′-fluoro modified nucleosides.

[0893] 408. The method of embodiment 407, wherein the one or more 2′-fluoro modified nucleosides of the sense strand is about 1, 2, 3, 4, 5, 6, 7, 8, 9, 10, 11, 12, 13, 14, 15, 16, 17, 18, 19, 20, or 21 2′-fluoro modified nucleosides.

[0894] 409. The method of embodiment 408, wherein the one or more 2′-fluoro modified nucleosides of the sense strand is about eleven 2′-fluoro modified nucleosides.

[0895] 410. The method of embodiment 408, wherein the one or more 2′-fluoro modified nucleosides of the sense strand is about four 2′-fluoro modified nucleosides.

[0896] 411. The method of embodiment 408, wherein the one or more 2′-fluoro modified nucleosides of the sense strand is about three 2′-fluoro modified nucleosides.

[0897] 412. The method of any one of embodiments 407-411, wherein the first nucleoside of the sense strand comprises the 2′-fluoro modified nucleoside, in a 5′ to 3′ direction.

[0898] 413. The method of any one of embodiments 407-412, wherein the third nucleoside of the sense strand comprises the 2′-fluoro modified nucleoside, in a 5′ to 3′ direction.

[0899] 414. The method of any one of embodiments 407-413, wherein the fifth nucleoside of the sense strand comprises the 2′-fluoro modified nucleoside, in a 5′ to 3′ direction.

[0900] 415. The method of any one of embodiments 407-414, wherein the seventh nucleoside of the sense strand comprises the 2′-fluoro modified nucleoside, in a 5′ to 3′ direction.

[0901] 416. The method of any one of embodiments 407-415, wherein the eighth nucleoside of the sense strand comprises the 2′-fluoro modified nucleoside, in a 5′ to 3′ direction.

[0902] 417. The method of any one of embodiments 407-416, wherein the ninth nucleoside of the sense strand comprises the 2′-fluoro modified nucleoside, in a 5′ to 3′ direction.

[0903] 418. The method of any one of embodiments 407-417, wherein the eleventh nucleoside of the sense strand comprises the 2′-fluoro modified nucleoside, in a 5′ to 3′ direction.

[0904] 419. The method of any one of embodiments 407-418, wherein the thirteenth nucleoside of the sense strand comprises the 2′-fluoro modified nucleoside, in a 5′ to 3′ direction.

[0905] 420. The method of any one of embodiments 407-419, wherein the fifteenth nucleoside of the sense strand comprises the 2′-fluoro modified nucleoside, in a 5′ to 3′ direction.

[0906] 421. The method of any one of embodiments 407-420, wherein the seventeenth nucleoside of the sense strand comprises the 2′-fluoro modified nucleoside, in a 5′ to 3′ direction.

[0907] 422. The method of any one of embodiments 407-421, wherein the nineteenth nucleoside of the sense strand comprises the 2′-fluoro modified nucleoside, in a 5′ to 3′ direction.

[0908] 423. The method of any one of embodiments 407-422, wherein the fifth, seventh, and ninth nucleosides of the sense strand comprises the 2′-fluoro modified nucleoside, in a 5′ to 3′ direction.

[0909] 424. The method of any one of embodiments 407-423, comprising the pattern fN-Z1-fN-Z2-fN, wherein fN comprises the 2′-fluoro modified nucleoside and Z1 and Z2 are independently a 2′-O-methyl modified nucleoside or a 2′-fluoro modified nucleoside.

[0910] 425. The method of embodiment 424, wherein the fN-Z1-fN-Z2-fN corresponds to nucleosides five to nine of the sense strand, in a 5′ to 3′ direction.

[0911] 426. The method of any one of embodiments 407-425, wherein the sense strand comprises at least two contiguous 2′-fluoro modified nucleosides.

[0912] 427. The method of embodiment 426, wherein the at least two contiguous 2′-fluoro modified nucleosides is two contiguous 2′-fluoro modified nucleosides.

[0913] 428. The method of embodiment 426, wherein the at least two contiguous 2′-fluoro modified nucleosides is three contiguous 2′-fluoro modified nucleosides.

[0914] 429. The method of any one of embodiments 405-428, wherein the antisense strand of the siRNA comprises one or more 2′-fluoro modified nucleosides.

[0915] 430. The method of embodiment 429, wherein the one or more 2′-fluoro modified nucleosides of the antisense strand is about 1, 2, 3, 4, 5, 6, 7, 8, 9, 10, 11, 12, 13, 14, 15, 16, 17, 18, 19, 20, or 21 2′-fluoro modified nucleosides.

[0916] 431. The method of embodiment 430, wherein the one or more 2′-fluoro modified nucleosides of the antisense strand is about eight 2′-fluoro modified nucleosides.

[0917] 432. The method of embodiment 430, wherein the one or more 2′-fluoro modified nucleosides of the antisense strand is about six 2′-fluoro modified nucleosides.

[0918] 433. The method of embodiment 430, wherein the one or more 2′-fluoro modified nucleosides of the antisense strand is about five 2′-fluoro modified nucleosides.

[0919] 434. The method of embodiment 430, wherein the one or more 2′-fluoro modified nucleosides of the antisense strand is about four 2′-fluoro modified nucleosides.

[0920] 435. The method of any one of embodiments 429-434, wherein the second nucleoside of the antisense strand comprises the 2′-fluoro modified nucleoside, in a 5′ to 3′ direction.

[0921] 436. The method of any one of embodiments 429-435, wherein the fourth nucleoside of the antisense strand comprises the 2′-fluoro modified nucleoside, in a 5′ to 3′ direction.

[0922] 437. The method of any one of embodiments 429-436, wherein the sixth nucleoside of the antisense strand comprises the 2′-fluoro modified nucleoside, in a 5′ to 3′ direction.

[0923] 438. The method of any one of embodiments 429-437, wherein the eighth nucleoside of the antisense strand comprises the 2′-fluoro modified nucleoside, in a 5′ to 3′ direction.

[0924] 439. The method of any one of embodiments 429-438, wherein the ninth nucleoside of the antisense strand comprises the 2′-fluoro modified nucleoside, in a 5′ to 3′ direction.

[0925] 440. The method of any one of embodiments 429-439, wherein the tenth nucleoside of the antisense strand comprises the 2′-fluoro modified nucleoside, in a 5′ to 3′ direction.

[0926] 441. The method of any one of embodiments 429-440, wherein the fourteenth nucleoside of the antisense strand comprises the 2′-fluoro modified nucleoside, in a 5′ to 3′ direction.

[0927] 442. The method of any one of embodiments 429-441, wherein the sixteenth nucleoside of the antisense strand comprises the 2′-fluoro modified nucleoside, in a 5′ to 3′ direction.

[0928] 443. The method of any one of embodiments 429-442, wherein the eighteenth nucleoside of the antisense strand comprises the 2′-fluoro modified nucleoside, in a 5′ to 3′ direction.

[0929] 444. The method of any one of embodiments 429-443, wherein the second and fourteenth nucleosides of the antisense strand comprises the 2′-fluoro modified nucleoside, in a 5′ to 3′ direction.

[0930] 445. The method of any one of embodiments 429-444, wherein the second, sixth, fourteenth, and sixteenth nucleosides of the antisense strand comprises the 2′-fluoro modified nucleoside, in a 5′ to 3′ direction.

[0931] 446. The method of any one of embodiments 429-445, comprising the pattern Z3-fN-Z4-fN, wherein fN comprises the 2′-fluoro modified nucleoside and Z3 and Z4 are independently a 2′-O-methyl modified nucleoside or a 2′-fluoro modified nucleoside.

[0932] 447. The method of embodiment 446, wherein the Z3-fN-Z4-fN corresponds to nucleosides thirteen to sixteen of the antisense strand, in a 5′ to 3′ direction.

[0933] 448. The method of any one of embodiments 404-447, wherein the modified nucleoside comprises a 2′-O-alkyl modified nucleoside.

[0934] 449. The method of embodiment 448, wherein the 2′-O-alkyl modified nucleoside comprises one or more 2′-O-methyl modified nucleosides.

[0935] 450. The method of embodiment 449, wherein the one or more 2′-O-methyl modified nucleosides is about 1, 2, 3, 4, 5, 6, 7, 8, 9, 10, 11, 12, 13, 14, 15, 16, 17, 18, 19, 20, 21, 22, 23, 24, 25, 26, 27, 28, 29, 30, 31, 32, 33, 34, 35, 36, 37, 38, 39, 40, 41, or 42 2′-O-methyl modified nucleosides.

[0936] 451. The method of any one of embodiments 448-450, wherein the sense strand of the siRNA comprises one or more 2′-O-methyl modified nucleosides.

[0937] 452. The method of embodiment 451, wherein the one or more 2′-O-methyl modified nucleosides of the sense strand is about 1, 2, 3, 4, 5, 6, 7, 8, 9, 10, 11, 12, 13, 14, 15, 16, 17, 18, 19, 20, or 21 2′-O-methyl modified nucleosides.

[0938] 453. The method of embodiment 452, wherein the one or more 2′-O-methyl modified nucleosides of the sense strand is about ten 2′-O-methyl modified nucleosides.

[0939] 454. The method of embodiment 452, wherein the one or more 2′-O-methyl modified nucleosides of the sense strand is about seventeen 2′-O-methyl modified nucleosides.

[0940] 455. The method of embodiment 452, wherein the one or more 2′-O-methyl modified nucleosides of the sense strand is about eighteen 2′-O-methyl modified nucleosides.

[0941] 456. The method of any one of embodiments 449-455, wherein the first nucleoside of the sense strand comprises the 2′-O-methyl modified nucleoside, in a 5′ to 3′ direction.

[0942] 457. The method of any one of embodiments 449-456, wherein the second nucleoside of the sense strand comprises the 2′-O-methyl modified nucleoside, in a 5′ to 3′ direction.

[0943] 458. The method of any one of embodiments 449-457, wherein the third nucleoside of the sense strand comprises the 2′-O-methyl modified nucleoside, in a 5′ to 3′ direction.

[0944] 459. The method of any one of embodiments 449-458, wherein the fourth nucleoside of the sense strand comprises the 2′-O-methyl modified nucleoside, in a 5′ to 3′ direction.

[0945] 460. The method of any one of embodiments 449-459, wherein the sixth nucleoside of the sense strand comprises the 2′-O-methyl modified nucleoside, in a 5′ to 3′ direction.

[0946] 461. The method of any one of embodiments 449-460, wherein the eighth nucleoside of the sense strand comprises the 2′-O-methyl modified nucleoside, in a 5′ to 3′ direction.

[0947] 462. The method of any one of embodiments 449-461, wherein the tenth nucleoside of the sense strand comprises the 2′-O-methyl modified nucleoside, in a 5′ to 3′ direction.

[0948] 463. The method of any one of embodiments 449-462, wherein the eleventh nucleoside of the sense strand comprises the 2′-O-methyl modified nucleoside, in a 5′ to 3′ direction.

[0949] 464. The method of any one of embodiments 449-463, wherein the twelfth nucleoside of the sense strand comprises the 2′-O-methyl modified nucleoside, in a 5′ to 3′ direction.

[0950] 465. The method of any one of embodiments 449-464, wherein the thirteenth nucleoside of the sense strand comprises the 2′-O-methyl modified nucleoside, in a 5′ to 3′ direction.

[0951] 466. The method of any one of embodiments 449-465, wherein the fourteenth nucleoside of the sense strand comprises the 2′-O-methyl modified nucleoside, in a 5′ to 3′ direction.

[0952] 467. The method of any one of embodiments 449-466, wherein the fifteenth nucleoside of the sense strand comprises the 2′-O-methyl modified nucleoside, in a 5′ to 3′ direction.

[0953] 468. The method of any one of embodiments 449-467, wherein the sixteenth nucleoside of the sense strand comprises the 2′-O-methyl modified nucleoside, in a 5′ to 3′ direction.

[0954] 469. The method of any one of embodiments 449-468, wherein the seventeenth nucleoside of the sense strand comprises the 2′-O-methyl modified nucleoside, in a 5′ to 3′ direction.

[0955] 470. The method of any one of embodiments 449-469, wherein the eighteenth nucleoside of the sense strand comprises the 2′-O-methyl modified nucleoside, in a 5′ to 3′ direction.

[0956] 471. The method of any one of embodiments 449-470, wherein the nineteenth nucleoside of the sense strand comprises the 2′-O-methyl modified nucleoside, in a 5′ to 3′ direction.

[0957] 472. The method of any one of embodiments 449-471, wherein the twentieth nucleoside of the sense strand comprises the 2′-O-methyl modified nucleoside, in a 5′ to 3′ direction.

[0958] 473. The method of any one of embodiments 449-472, wherein the twenty-first nucleoside of the sense strand comprises the 2′-O-methyl modified nucleoside, in a 5′ to 3′ direction.

[0959] 474. The method of any one of embodiments 449-473, wherein the second, fourth, sixth, tenth, twelfth, fourteenth, and sixteenth, eighteenth, twentieth, and twenty-first nucleosides of the sense strand comprises the 2′-O-methyl modified nucleoside, in a 5′ to 3′ direction.

[0960] 475. The method of any one of embodiments 449-474, comprising the pattern mN-Z5-mN-Z6, wherein mN comprises the 2′-O-methyl modified nucleoside and Z5 and Z6 are independently a 2′-O-methyl modified nucleoside or a 2′-fluoro modified nucleoside.

[0961] 476. The method of embodiment 475, wherein the mN-Z5-mN-Z6-mN corresponds to nucleosides four to seven of the sense strand, in a 5′ to 3′ direction.

[0962] 477. The method of embodiment 475 or embodiment 476, wherein Z5 is the 2′-fluoro modified nucleoside.

[0963] 478. The method of embodiment 475 or embodiment 476, wherein Z5 is the 2′-O-methyl modified nucleoside.

[0964] 479. The method of any one of embodiments 475-478, wherein Z6 is the 2′-fluoro modified nucleoside.

[0965] 480. The method of any one of embodiments 475-478, wherein Z6 is the 2′-O-methyl modified nucleoside.

[0966] 481. The method of any one of embodiments 449-480, comprising the pattern mN-Z5-mN-Z6-mN, wherein mN comprises the 2′-O-methyl modified nucleoside and Z5 and Z6 are independently a 2′-O-methyl modified nucleoside or a 2′-fluoro modified nucleoside.

[0967] 482. The method of embodiment 481, wherein the mN-Z5-mN-Z6-mN corresponds to nucleosides two to six of the sense strand, in a 5′ to 3′ direction.

[0968] 483. The method of embodiment 481, wherein the mN-Z5-mN-Z6-mN corresponds to nucleosides ten to fourteen of the sense strand, in a 5′ to 3′ direction.

[0969] 484. The method of embodiment 481, wherein the mN-Z5-mN-Z6-mN corresponds to nucleosides twelve to sixteen of the sense strand, in a 5′ to 3′ direction.

[0970] 485. The method of embodiment 481, wherein the mN-Z5-mN-Z6-mN corresponds to nucleosides fourteen to eighteen of the sense strand, in a 5′ to 3′ direction.

[0971] 486. The method of embodiment 481, wherein the mN-Z5-mN-Z6-mN corresponds to nucleosides sixteen to twenty of the sense strand, in a 5′ to 3′ direction.

[0972] 487. The method of any one of embodiments 449-486, comprising the pattern mN-Z5-mN-Z6-mN-Z7-mN, wherein Z7 is a 2′-O-methyl modified nucleoside or a 2′-fluoro modified nucleoside.

[0973] 488. The method of embodiment 487, wherein the mN-Z5-mN-Z6-mN-Z7-mN corresponds to nucleosides ten to sixteen of the sense strand, in a 5′ to 3′ direction.

[0974] 489. The method of embodiment 488, wherein the mN-Z5-mN-Z6-mN-Z7-mN corresponds to nucleosides twelve to eighteen of the sense strand, in a 5′ to 3′ direction.

[0975] 490. The method of embodiment 488, wherein the mN-Z5-mN-Z6-mN-Z7-mN corresponds to nucleosides fourteen to twenty of the sense strand, in a 5′ to 3′ direction.

[0976] 491. The method of any one of embodiments 449-490, comprising the pattern mN-Z5-mN-Z6-mN-Z7-mN-Z8-mN, wherein Z8 is a 2′-O-methyl modified nucleoside or a 2′-fluoro modified nucleoside.

[0977] 492. The method of embodiment 491, wherein the mN-Z5-mN-Z6-mN-Z7-mN-Z8-mN corresponds to nucleosides ten to eighteen of the sense strand, in a 5′ to 3′ direction.

[0978] 493. The method of embodiment 491, wherein the mN-Z5-mN-Z6-mN-Z7-mN-Z8-mN corresponds to nucleosides twelve to twenty of the sense strand, in a 5′ to 3′ direction.

[0979] 494. The method of any one of embodiments 449-493, comprising the pattern mN-Z5-mN-Z6-mN-Z7-mN-Z8-mN-Z9-mN, wherein Z9 is a 2′-O-methyl modified nucleoside or a 2′-fluoro modified nucleoside.

[0980] 495. The method of embodiment 494, wherein the mN-Z5-mN-Z6-mN-Z7-mN-Z8-mN-Z9-mN corresponds to nucleosides ten to twenty of the sense strand, in a 5′ to 3′ direction.

[0981] 496. The method of any one of embodiments 449-495, wherein the sense strand comprises at least two contiguous 2′-O-methyl modified nucleosides.

[0982] 497. The method of embodiment 496, wherein the at least two contiguous 2′-O-methyl modified nucleosides is three contiguous 2′-O-methyl modified nucleosides.

[0983] 498. The method of embodiment 496, wherein the at least two contiguous 2′-O-methyl modified nucleosides is four contiguous 2′-O-methyl modified nucleosides.

[0984] 499. The method of embodiment 496, wherein the at least two contiguous 2′-O-methyl modified nucleosides is five contiguous 2′-O-methyl modified nucleosides.

[0985] 500. The method of embodiment 496, wherein the at least two contiguous 2′-O-methyl modified nucleosides is six contiguous 2′-O-methyl modified nucleosides.

[0986] 501. The method of embodiment 496, wherein the at least two contiguous 2′-O-methyl modified nucleosides is seven contiguous 2′-O-methyl modified nucleosides.

[0987] 502. The method of embodiment 496, wherein the at least two contiguous 2′-O-methyl modified nucleosides is eight contiguous 2′-O-methyl modified nucleosides.

[0988] 503. The method of embodiment 496, wherein the at least two contiguous 2′-O-methyl modified nucleosides is nine contiguous 2′-O-methyl modified nucleosides.

[0989] 504. The method of embodiment 496, wherein the at least two contiguous 2′-O-methyl modified nucleosides is ten contiguous 2′-O-methyl modified nucleosides.

[0990] 505. The method of embodiment 496, wherein the at least two contiguous 2′-O-methyl modified nucleosides is eleven contiguous 2′-O-methyl modified nucleosides.

[0991] 506. The method of embodiment 496, wherein the at least two contiguous 2′-O-methyl modified nucleosides is twelve contiguous 2′-O-methyl modified nucleosides.

[0992] 507. The method of any one of embodiments 449-506, wherein the antisense strand of the siRNA comprises one or more 2′-O-methyl modified nucleosides.

[0993] 508. The method of embodiment 507, wherein the one or more 2′-O-methyl modified nucleosides of the antisense strand is about 1, 2, 3, 4, 5, 6, 7, 8, 9, 10, 11, 12, 13, 14, 15, 16, 17, 18, 19, 20, or 21 2′-O-methyl modified nucleosides.

[0994] 509. The method of embodiment 508, wherein the one or more 2′-O-methyl modified nucleosides of the antisense strand is about thirteen 2′-O-methyl modified nucleosides.

[0995] 510. The method of embodiment 508, wherein the one or more 2′-O-methyl modified nucleosides of the antisense strand is about fifteen 2′-O-methyl modified nucleosides.

[0996] 511. The method of embodiment 508, wherein the one or more 2′-O-methyl modified nucleosides of the antisense strand is about seventeen 2′-O-methyl modified nucleosides.

[0997] 512. The method of any one of embodiments 507-511, wherein the first nucleoside of the antisense strand comprises the 2′-O-methyl modified nucleoside, in a 5′ to 3′ direction.

[0998] 513. The method of any one of embodiments 507-512, wherein the third nucleoside of the antisense strand comprises the 2′-O-methyl modified nucleoside, in a 5′ to 3′ direction.

[0999] 514. The method of any one of embodiments 507-513, wherein the fourth nucleoside of the antisense strand comprises the 2′-O-methyl modified nucleoside, in a 5′ to 3′ direction.

[1000] 515. The method of any one of embodiments 507-514, wherein the fifth nucleoside of the antisense strand comprises the 2′-O-methyl modified nucleoside, in a 5′ to 3′ direction.

[1001] 516. The method of any one of embodiments 507-515, wherein the seventh nucleoside of the antisense strand comprises the 2′-O-methyl modified nucleoside, in a 5′ to 3′ direction.

[1002] 517. The method of any one of embodiments 507-516, wherein the eighth nucleoside of the antisense strand comprises the 2′-O-methyl modified nucleoside, in a 5′ to 3′ direction.

[1003] 518. The method of any one of embodiments 507-517, wherein the ninth nucleoside of the antisense strand comprises the 2′-O-methyl modified nucleoside, in a 5′ to 3′ direction.

[1004] 519. The method of any one of embodiments 507-518, wherein the tenth nucleoside of the antisense strand comprises the 2′-O-methyl modified nucleoside, in a 5′ to 3′ direction.

[1005] 520. The method of any one of embodiments 507-519, wherein the eleventh nucleoside of the antisense strand comprises the 2′-O-methyl modified nucleoside, in a 5′ to 3′ direction.

[1006] 521. The method of any one of embodiments 507-520, wherein the twelfth nucleoside of the antisense strand comprises the 2′-O-methyl modified nucleoside, in a 5′ to 3′ direction.

[1007] 522. The method of any one of embodiments 507-521, wherein the thirteenth nucleoside of the antisense strand comprises the 2′-O-methyl modified nucleoside, in a 5′ to 3′ direction.

[1008] 523. The method of any one of embodiments 507-522, wherein the fifteenth nucleoside of the antisense strand comprises the 2′-O-methyl modified nucleoside, in a 5′ to 3′ direction.

[1009] 524. The method of any one of embodiments 507-523, wherein the seventeenth nucleoside of the antisense strand comprises the 2′-O-methyl modified nucleoside, in a 5′ to 3′ direction.

[1010] 525. The method of any one of embodiments 507-524, wherein the eighteenth nucleoside of the antisense strand comprises the 2′-O-methyl modified nucleoside, in a 5′ to 3′ direction.

[1011] 526. The method of any one of embodiments 507-525, wherein the nineteenth nucleoside of the antisense strand comprises the 2′-O-methyl modified nucleoside, in a 5′ to 3′ direction.

[1012] 527. The method of any one of embodiments 507-526, wherein the twentieth nucleoside of the antisense strand comprises the 2′-O-methyl modified nucleoside, in a 5′ to 3′ direction.

[1013] 528. The method of any one of embodiments 507-527, wherein the twenty-first nucleoside of the antisense strand comprises the 2′-O-methyl modified nucleoside, in a 5′ to 3′ direction.

[1014] 529. The method of any one of embodiments 507-528, wherein the first, third, fifth, seventh, eleventh, twelfth, thirteenth, fifteenth, seventeenth, nineteenth, twentieth, and twenty-first nucleosides of the antisense strand comprises the 2′-O-methyl modified nucleoside, in a 5′ to 3′ direction.

[1015] 530. The method of any one of embodiments 507-529, wherein the antisense strand comprises at least two contiguous 2′-O-methyl modified nucleosides.

[1016] 531. The method of embodiment 530, wherein the at least two contiguous 2′-O-methyl modified nucleosides is three contiguous 2′-O-methyl modified nucleosides.

[1017] 532. The method of embodiment 530, wherein the at least two contiguous 2′-O-methyl modified nucleosides is four contiguous 2′-O-methyl modified nucleosides.

[1018] 533. The method of embodiment 530, wherein the at least two contiguous 2′-O-methyl modified nucleosides is five contiguous 2′-O-methyl modified nucleosides.

[1019] 534. The method of embodiment 530, wherein the at least two contiguous 2′-O-methyl modified nucleosides is six contiguous 2′-O-methyl modified nucleosides.

[1020] 535. The method of embodiment 530, wherein the at least two contiguous 2′-O-methyl modified nucleosides is seven contiguous 2′-O-methyl modified nucleosides.

[1021] 536. The method of any one of embodiments 507-535, wherein the antisense strand comprises a first sequence comprising at least two contiguous 2′-O-methyl modified nucleosides and a second sequence comprising at least two contiguous 2′-O-methyl modified nucleosides.

[1022] 537. The method of embodiment 536, wherein the first sequence comprises at least three contiguous 2′-O-methyl modified nucleosides, and the second sequence comprises at least three contiguous 2′-O-methyl modified nucleosides.

[1023] 538. The method of embodiment 536, wherein the first sequence comprises three contiguous 2′-O-methyl modified nucleosides, and the second sequence comprises three contiguous 2′-O-methyl modified nucleosides.

[1024] 539. The method of embodiment 536, wherein the first sequence comprises four contiguous 2′-O-methyl modified nucleosides, and the second sequence comprises five contiguous 2′-O-methyl modified nucleosides.

[1025] 540. The method of embodiment 536, wherein the first sequence comprises seven contiguous 2′-O-methyl modified nucleosides, and the second sequence comprises five contiguous 2′-O-methyl modified nucleosides.

[1026] 541. The method of embodiment 536, wherein the first sequence comprises at least four contiguous 2′-O-methyl modified nucleosides.

[1027] 542. The method of embodiment 536, wherein the first sequence comprises at least five contiguous 2′-O-methyl modified nucleosides.

[1028] 543. The method of embodiment 536, wherein the first sequence comprises at least six contiguous 2′-O-methyl modified nucleosides.

[1029] 544. The method of embodiment 536, wherein the first sequence comprises at least seven contiguous 2′-O-methyl modified nucleosides.

[1030] 545. The method of any one of embodiments 541-544, wherein the second sequence comprises at least four contiguous 2′-O-methyl modified nucleosides.

[1031] 546. The method of any one of embodiments 541-544, wherein the second sequence comprises at least five contiguous 2′-O-methyl modified nucleosides.

[1032] 547. The method of any one of embodiments 511-544, wherein the second sequence comprises at least six contiguous 2′-O-methyl modified nucleosides.

[1033] 548. The method of any one of embodiments 511-544, wherein the second sequence comprises at least seven contiguous 2′-O-methyl modified nucleosides.

[1034] 549. The method of any one of embodiments 368-548, wherein the sense strand comprises a ribose.

[1035] 550. The method of embodiment 549, wherein the sense strand comprises about 1, 2, 3, 4, 5, 6, 7, 8, 9, 10, 11, 12, 13, 14, 15, 16, 17, 18, 19, 20, or 21 ribose.

[1036] 551. The method of embodiment 549 or embodiment 550, wherein the first nucleoside of the sense strand comprises the ribose, in a 5′ to 3′ direction.

[1037] 552. The method of any one of embodiments 549-551, wherein the second nucleoside of the sense strand comprises the ribose, in a 5′ to 3′ direction.

[1038] 553. The method of any one of embodiments 549-552, wherein the third nucleoside of the sense strand comprises the ribose, in a 5′ to 3′ direction.

[1039] 554. The method of any one of embodiments 549-553, wherein the fourth nucleoside of the sense strand comprises the ribose, in a 5′ to 3′ direction.

[1040] 555. The method of any one of embodiments 549-554, wherein the fifth nucleoside of the sense strand comprises the ribose, in a 5′ to 3′ direction.

[1041] 556. The method of any one of embodiments 549-555, wherein the sixth nucleoside of the sense strand comprises the ribose, in a 5′ to 3′ direction.

[1042] 557. The method of any one of embodiments 549-556, wherein the seventh nucleoside of the sense strand comprises the ribose, in a 5′ to 3′ direction.

[1043] 558. The method of any one of embodiments 549-557, wherein the eighth nucleoside of the sense strand comprises the ribose, in a 5′ to 3′ direction.

[1044] 559. The method of any one of embodiments 549-558, wherein the ninth nucleoside of the sense strand comprises the ribose, in a 5′ to 3′ direction.

[1045] 560. The method of any one of embodiments 549-559, wherein the tenth nucleoside of the sense strand comprises the ribose, in a 5′ to 3′ direction.

[1046] 561. The method of any one of embodiments 549-560, wherein the eleventh nucleoside of the sense strand comprises the ribose, in a 5′ to 3′ direction.

[1047] 562. The method of any one of embodiments 549-561, wherein the twelfth nucleoside of the sense strand comprises the ribose, in a 5′ to 3′ direction.

[1048] 563. The method of any one of embodiments 549-562, wherein the thirteenth nucleoside of the sense strand comprises the ribose, in a 5′ to 3′ direction.

[1049] 564. The method of any one of embodiments 549-563, wherein the fourteenth nucleoside of the sense strand comprises the ribose, in a 5′ to 3′ direction.

[1050] 565. The method of any one of embodiments 549-564, wherein the fifteenth nucleoside of the sense strand comprises the ribose, in a 5′ to 3′ direction.

[1051] 566. The method of any one of embodiments 549-565, wherein the sixteenth nucleoside of the sense strand comprises the ribose, in a 5′ to 3′ direction.

[1052] 567. The method of any one of embodiments 549-566, wherein the seventeenth nucleoside of the sense strand comprises the ribose, in a 5′ to 3′ direction.

[1053] 568. The method of any one of embodiments 549-567, wherein the eighteenth nucleoside of the sense strand comprises the ribose, in a 5′ to 3′ direction.

[1054] 569. The method of any one of embodiments 549-568, wherein the nineteenth nucleoside of the sense strand comprises the ribose, in a 5′ to 3′ direction.

[1055] 570. The method of any one of embodiments 549-569, wherein the twentieth nucleoside of the sense strand comprises the ribose, in a 5′ to 3′ direction.

[1056] 571. The method of any one of embodiments 549-570, wherein the twenty-first nucleoside of the sense strand comprises the ribose, in a 5′ to 3′ direction.

[1057] 572. The method of any one of embodiments 368-571, wherein the antisense strand comprises a ribose.

[1058] 573. The method of embodiment 572, wherein the antisense strand comprises about 1, 2, 3, 4, 5, 6, 7, 8, 9, 10, 11, 12, 13, 14, 15, 16, 17, 18, 19, 20, or 21 ribose.

[1059] 574. The method of embodiment 572 or embodiment 573, wherein the first nucleoside of the antisense strand comprises the ribose, in a 5′ to 3′ direction.

[1060] 575. The method of any one of embodiments 572-574, wherein the second nucleoside of the antisense strand comprises the ribose, in a 5′ to 3′ direction.

[1061] 576. The method of any one of embodiments 572-575, wherein the third nucleoside of the antisense strand comprises the ribose, in a 5′ to 3′ direction.

[1062] 577. The method of any one of embodiments 572-576, wherein the fourth nucleoside of the antisense strand comprises the ribose, in a 5′ to 3′ direction.

[1063] 578. The method of any one of embodiments 572-577, wherein the fifth nucleoside of the antisense strand comprises the ribose, in a 5′ to 3′ direction.

[1064] 579. The method of any one of embodiments 572-578, wherein the sixth nucleoside of the antisense strand comprises the ribose, in a 5′ to 3′ direction.

[1065] 580. The method of any one of embodiments 572-579, wherein the seventh nucleoside of the antisense strand comprises the ribose, in a 5′ to 3′ direction.

[1066] 581. The method of any one of embodiments 572-580, wherein the eighth nucleoside of the antisense strand comprises the ribose, in a 5′ to 3′ direction.

[1067] 582. The method of any one of embodiments 572-581, wherein the ninth nucleoside of the antisense strand comprises the ribose, in a 5′ to 3′ direction.

[1068] 583. The method of any one of embodiments 572-582, wherein the tenth nucleoside of the sense antisense comprises the ribose, in a 5′ to 3′ direction.

[1069] 584. The method of any one of embodiments 572-583, wherein the eleventh nucleoside of the antisense strand comprises the ribose, in a 5′ to 3′ direction.

[1070] 585. The method of any one of embodiments 572-584, wherein the twelfth nucleoside of the antisense strand comprises the ribose, in a 5′ to 3′ direction.

[1071] 586. The method of any one of embodiments 572-585, wherein the thirteenth nucleoside of the antisense strand comprises the ribose, in a 5′ to 3′ direction.

[1072] 587. The method of any one of embodiments 572-586, wherein the fourteenth nucleoside of the antisense strand comprises the ribose, in a 5′ to 3′ direction.

[1073] 588. The method of any one of embodiments 572-587, wherein the fifteenth nucleoside of the antisense strand comprises the ribose, in a 5′ to 3′ direction.

[1074] 589. The method of any one of embodiments 572-588, wherein the sixteenth nucleoside of the antisense strand comprises the ribose, in a 5′ to 3′ direction.

[1075] 590. The method of any one of embodiments 572-589, wherein the seventeenth nucleoside of the antisense strand comprises the ribose, in a 5′ to 3′ direction.

[1076] 591. The method of any one of embodiments 572-590, wherein the eighteenth nucleoside of the antisense strand comprises the ribose, in a 5′ to 3′ direction.

[1077] 592. The method of any one of embodiments 572-591, wherein the nineteenth nucleoside of the antisense strand comprises the ribose, in a 5′ to 3′ direction.

[1078] 593. The method of any one of embodiments 572-592, wherein the twentieth nucleoside of the antisense strand comprises the ribose, in a 5′ to 3′ direction.

[1079] 594. The method of any one of embodiments 572-593, wherein the twenty-first nucleoside of the antisense strand comprises the ribose, in a 5′ to 3′ direction.

[1080] 595. The method of any one of embodiments 368-594, further comprising a lipid attached at either 3′ or 5′ terminus.

[1081] 596. The method of embodiment 595, wherein the lipid comprises cholesterol, myristoyl, palmitoyl, stearoyl, lithocholoyl, docosanoyl, docosahexaenoyl, myristyl, palmityl stearyl, α-tocopherol, or a combination thereof 597. The method of embodiment 595 or embodiment 596, wherein the lipid comprises a first lipid on the sense strand and a second lipid on the antisense strand.

[1082] 598. The method of any one of embodiments 595-597, wherein the lipid is positioned on the sense strand.

[1083] 599. The method of embodiment 598, wherein the lipid is positioned at the 5′ end of the sense strand.

[1084] 600. The method of embodiment 598, wherein the lipid is positioned at the 3′ end of the sense strand.

[1085] 601. The method of any one of embodiments 595-600, wherein the lipid is positioned on the antisense strand.

[1086] 602. The method of embodiment 601, wherein the lipid is positioned at the 5′ end of the antisense strand.

[1087] 603. The method of embodiment 601, wherein the lipid is positioned at the 3′ end of the antisense strand.

[1088] 604. The method of any one of embodiments 368-594, further comprising an arginine-glycine-aspartic acid (RGD) ligand attached at a 3′ terminus and/or a 5′ terminus.

[1089] 605. The method of any one of embodiments 368-603, further comprising an RGD ligand attached at either a 3′ terminus or a 5′ terminus.

[1090] 606. The method of embodiment 604 or 605, wherein the RGD ligand comprises Cyclo(-Arg-Gly-Asp-D-Phe-Cys), Cyclo(-Arg-Gly-Asp-D-Phe-Lys), Cyclo(-Arg-Gly-Asp-D-Phe-azido), Cyclo(-Arg-Gly-Asp-D-Phe-alkynyl), amino benzoic acid-based RGD, or a combination thereof.

[1091] 607. The method of embodiment 604 or embodiment 605, wherein the RGD ligand is composed of 2, 3 or 4 RGD ligands.

[1092] 608. The method of any one of embodiments 604-607, wherein the RGD is positioned on the sense strand.

[1093] 609. The method of embodiment 608, wherein the RGD is positioned at the 5′ end of the sense strand.

[1094] 610. The method of embodiment 608, wherein the RGD is positioned at the 3′ end of the sense strand.

[1095] 611. The method of any one of embodiments 604-607, wherein the RGD is positioned on the antisense strand.

[1096] 612. The method of embodiment 611, wherein the RGD ligand is positioned at the 5′ end of the antisense strand.

[1097] 613. The method of embodiment 611, wherein the RGD ligand is positioned at the 3′ end of the antisense strand.

[1098] 614. The method of any one of embodiments 368-613, wherein the sense strand and the antisense strand form a double-stranded RNA duplex.

[1099] 615. The method of embodiment 614, wherein the double-stranded RNA duplex comprises from about 14 to about 30 nucleosides.

[1100] 616. The method of embodiment 614, wherein the double-stranded RNA duplex comprises from about 17 to about 30 nucleosides.

[1101] 617. The method of embodiment 614, wherein the double-stranded RNA duplex comprises about 21 nucleosides.

[1102] 618. The method of any one of embodiments 614-617, wherein the double-stranded RNA duplex comprises at least one base pair.

[1103] 619. The method of embodiment 618, wherein the first base pair of the double-stranded RNA duplex is an AU base pair.

[1104] 620. The method of any one of embodiments 368-614, wherein the sense strand comprises pattern 1S: 5′ fN s mN s fN-mN-fN-mN-fN-fN-fN-mN-fN-mN-fN-mN-fN-mN-fN-mN-fN s mN s mN 3′ (SEQ ID NO: 11381), wherein “fN” is a 2′-fluoro-modified nucleoside, “mN” is a 2′-O-methyl modified nucleoside, “-” is a phosphodiester, and “s” is a phosphorothioate.

[1105] 621. The method of any one of embodiments 368-614, wherein the sense strand comprises pattern 2S: 5′ mN s mN s mN-mN-fN-mN-fN-fN-fN-mN-mN-mN-mN-mN-mN-mN-mN-mN-mN s mN s mN 3′ (SEQ ID NO: 11382), wherein “fN” is a 2′-fluoro-modified nucleoside, “mN” is a 2′-O-methyl modified nucleoside, “-” is a phosphodiester, and “s” is a phosphorothioate.

[1106] 622. The method of any one of embodiments 368-614, wherein the sense strand comprises pattern 3S: 5′ mN s mN s mN-mN-fN-mN-fN-mN-fN-mN-mN-mN-mN-mN-mN-mN-mN-mN-mN s mN s mN 3′ (SEQ ID NO: 11383), wherein “fN” is a 2′-fluoro-modified nucleoside, “mN” is a 2′-O-methyl modified nucleoside, “-” is a phosphodiester, and “s” is a phosphorothioate.

[1107] 623. The method of any one of embodiments 368-614, wherein the sense strand comprises pattern 4S: 5′ fN s mN s fN-mN-fN-mN-fN-fN-fN-mN-fN-mN-fN-mN-fN-mN-fN-mN-fN s mN s mN-N-Lipid 3′ (SEQ ID NO: 11384), wherein “fN” is a 2′-fluoro-modified nucleoside, “mN” is a 2′-O-methyl modified nucleoside, “-” is a phosphodiester, “s” is a phosphorothioate, and N comprises one or more nucleosides.

[1108] 624. The method of embodiment 623, wherein the one or more nucleosides is three nucleosides.

[1109] 625. The method of embodiment 623 or 624, wherein each of the one or more nucleosides independently comprise a ribose or deoxyribose.

[1110] 626. The method of any one of embodiments 368-619, wherein the sense strand comprises pattern 5S: 5′ mN s mN s mN-mN-fN-mN-fN-fN-fN-mN-mN-mN-mN-mN-mN-mN-mN-mN-mN s mN s mN—N-Lipid 3′ (SEQ ID NO: 11385), wherein “fN” is a 2′-fluoro-modified nucleoside, “mN” is a 2′-O-methyl modified nucleoside, “-” is a phosphodiester, “s” is a phosphorothioate, and N comprises one or more nucleosides.

[1111] 627. The method of embodiment 626, wherein the one or more nucleosides is three nucleosides.

[1112] 628. The method of embodiment 626 or 627, wherein each of the one or more nucleosides independently comprise a ribose or deoxyribose.

[1113] 629. The method of any one of embodiments 368-628, wherein the antisense strand comprises pattern 1AS: 5′ mN s fN s mN-fN-mN-fN-mN-fN-mN-fN-mN-mN-mN-fN-mN-fN-mN-fN-mN s mN s mN 3′ (SEQ ID NO: 11386), wherein “fN” is a 2′-fluoro-modified nucleoside, “mN” is a 2′-O-methyl modified nucleoside, “-” is a phosphodiester, and “s” is a phosphorothioate.

[1114] 630. The method of any one of embodiments 368-628, wherein the antisense strand comprises pattern 2AS: 5′ mN s fN s mN-mN-mN-fN-mN-fN-fN-mN-mN-mN-mN-fN-mN-fN-mN-mN-mN s mN s mN 3′ (SEQ ID NO: 11387), wherein “fN” is a 2′-fluoro-modified nucleoside, “mN” is a 2′-O-methyl modified nucleoside, “-” is a phosphodiester, and “s” is a phosphorothioate.

[1115] 631. The method of any one of embodiments 368-628, wherein the antisense strand comprises pattern 3AS: 5′ mN s fN s mN-mN-mN-fN-mN-mN-mN-mN-mN-mN-mN-fN-mN-fN-mN-mN-mN s mN s mN 3′ (SEQ ID NO: 11388), wherein “fN” is a 2′-fluoro-modified nucleoside, “mN” is a 2′-O-methyl modified nucleoside, “-” is a phosphodiester, and “s” is a phosphorothioate.

[1116] 632. The method of any one of embodiments 368-628, wherein the antisense strand comprises pattern 4AS: 5′ mN s fN s mN-fN-mN-fN-mN-mN-mN-mN-mN-mN-mN-fN-mN-fN-mN-mN-mN s mN s mN 3′ (SEQ ID NO: 11389), wherein “fN” is a 2′-fluoro-modified nucleoside, “mN” is a 2′-O-methyl modified nucleoside, “-” is a phosphodiester, and “s” is a phosphorothioate.

[1117] 633. The method of any one of embodiments 368-619, wherein the sense strand comprises pattern 1S and the antisense strand comprises pattern 1AS.

[1118] 634. The method of any one of embodiments 368-619, wherein the sense strand comprises pattern 2S and the antisense strand comprises pattern 2AS.

[1119] 635. The method of any one of embodiments 368-619, wherein the sense strand comprises pattern 3S and the antisense strand comprises pattern 3AS.

[1120] 636. The method of any one of embodiments 368-619, wherein the sense strand comprises pattern 4S and the antisense strand comprises pattern 4AS.

### FURTHER EMBODIMENTS

[1121] 1. A composition comprising an oligonucleotide that targets angiopoietin-like 7 (ANGPTL7) and when administered to a cell decreases expression of ANGPTL7, wherein the oligonucleotide comprises a small interfering RNA (siRNA) comprising a sense strand and an antisense strand, and
[1122] wherein:
[1123] (i) the sense strand comprises the modification pattern of: 5′-NfsnsNfnNfnNfnNfnNfnNfnNfnNfnNfsnsn-3′ (SEQ ID NO: 11394);
[1124] (ii) the antisense strand comprises a modification pattern selected from the group consisting of: 5′-nsNfsnNfnNfnNfnNfnNfnNfnNfnNfnsnsn-3′ (SEQ ID NO: 11399), 5′-nsNfsnNfnNfnNfNfnnnnNfnNfnnnsnsn-3′ (SEQ ID NO: 11400), and 5′-nsNfsnnnnnnnnnnnNfnnnnnsnsn-3′ (SEQ ID NO: 11401); or
[1125] (iii) a combination of (i) and (ii),
[1126] wherein “Nf” is a 2′-fluoro-modified nucleoside, “n” is a 2′-O-methyl modified nucleoside, and “s” is a phosphorothioate linkage.

[1127] 2. The composition of embodiment 1, wherein the oligonucleotide comprises a lipid attached at a 3′ or a 5′ terminus of the oligonucleotide.

[1128] 3. The composition of embodiment 2, wherein the oligonucleotide comprises a lipid attached at a 3′ terminus of the sense strand.

[1129] 4. The composition of embodiment 2, wherein the oligonucleotide comprises a lipid attached at a 5′ terminus of the sense strand.

[1130] 5. A composition comprising an oligonucleotide that targets angiopoietin-like 7 (ANGPTL7) and when administered to a cell decreases expression of ANGPTL7, wherein the oligonucleotide comprises a small interfering RNA (siRNA) comprising a sense strand and an antisense strand, and
[1131] wherein the sense strand comprises the modification pattern of: 5′-nsnsnnNfnNfnNfnnnnnnnnnnsnsn-Lipid-3′ (SEQ ID NO: 11396),
[1132] wherein “Nf” is a 2′-fluoro-modified nucleoside, “n” is a 2′-O-methyl modified nucleoside, and “s” is a phosphorothioate linkage.

[1133] 6. The composition of any one of the preceding embodiments, wherein the lipid is selected from the group consisting of: cholesterol, myristoyl, palmitoyl, stearoyl, lithocholoyl, docosanoyl, docosahexaenoyl, myristyl, palmityl stearyl, α-tocopherol, and any combination thereof.

[1134] 7. The composition of embodiment 6, wherein the lipid comprises cholesterol.

[1135] 8. The composition of any one of the preceding embodiments, wherein the oligonucleotide further comprises an arginine-glycine-aspartic acid (RGD) peptide attached at a 3′ or 5′ terminus of the oligonucleotide.

[1136] 9. The composition of embodiment 8, wherein the RGD peptide is selected from the group consisting of: Cyclo(-Arg-Gly-Asp-D-Phe-Cys), Cyclo(-Arg-Gly-Asp-D-Phe-Lys), Cyclo(-Arg-Gly-Asp-D-Phe-azido), an amino benzoic acid derived RGD, and any combination thereof.

[1137] 10. The composition of any one of the preceding embodiments, wherein the antisense strand is complementary to a portion of a nucleic acid having the nucleoside sequence of SEQ ID NO: 11085.

[1138] 11. The composition of any one of the preceding embodiments, wherein the sense strand and the antisense strand each have 14 to 30 nucleotides.

[1139] 12. The composition of any one of the preceding embodiments, wherein the sense strand comprises a nucleoside sequence having at least 85% sequence identity to any one of SEQ ID NOS: 1-2206, 11450-11474, or 11529-11533.

[1140] 13. The composition of any one of the preceding embodiments, wherein the sense strand comprises the nucleoside sequence of any one of SEQ ID NOS: 1-2206, 11450-11474, or 11529-11533, or a sense strand sequence thereof having 1 or 2 nucleoside substitutions, additions, or deletions.

[1141] 14. The composition of any one of the preceding embodiments, wherein the sense strand comprises the nucleoside sequence of any one of SEQ ID NOS: 1-2206, 11450-11474, or 11529-11533.

[1142] 15. The composition of any one of the preceding embodiments, wherein the sense strand consists of the nucleoside sequence of any one of SEQ ID NOS: 1-2206, 11450-11474, or 11529-11533.

[1143] 16. The composition of any one of the preceding embodiments, wherein the sense strand comprises one of SEQ ID NOS: 11470, 11473, or 11474.

[1144] 17. The composition of any one of the preceding embodiments, wherein the antisense strand comprises a nucleoside sequence having at least 85% sequence identity to any one of SEQ ID NOS: 2207-4412, 11475-11499, or 11534-11538.

[1145] 18. The composition of any one of the preceding embodiments, wherein the antisense strand comprises the nucleoside sequence of any one of SEQ ID NOS: 2207-4412, 11475-11499, or 11534-11538, or an antisense strand sequence thereof having 1 or 2 nucleoside substitutions, additions, or deletions.

[1146] 19. The composition of any one of the preceding embodiments, wherein the antisense strand comprises the nucleoside sequence of any one of SEQ ID NOS: 2207-4412, 11475-11499, or 11534-11538.

[1147] 20. The composition of any one of the preceding embodiments, wherein the antisense strand consists of the nucleoside sequence of any one of SEQ ID NOS: 2207-4412, 11475-11499, or 11534-11538.

[1148] 21. The composition of any one of the preceding embodiments, wherein the antisense strand comprises one of SEQ ID NOS: 11495, 11498, or 11499.

[1149] 22. A composition comprising an oligonucleotide that targets angiopoietin like 7 (ANGPTL7) and when administered to a cell decreases expression of ANGPTL7, wherein the oligonucleotide comprises a small interfering RNA (siRNA) comprising a sense strand comprising a nucleoside sequence having at least 85% sequence identity to any one of SEQ ID NOS: 11402-11421, 11442-11445, or 11500-11503; and an antisense strand comprising a nucleoside sequence having at least 85% sequence identity to any one of SEQ ID NOS: 11422-11441, 11446-11449, or 11504-11507.

[1150] 23. The composition of embodiment 22, wherein the sense strand comprises the nucleoside sequence of any one of SEQ ID NOS: 11402-11421, 11442-11445, or 11500-11503, ora sense strand sequence thereof having 1 or 2 nucleoside substitutions, additions, or deletions.

[1151] 24. The composition of embodiment 22 or 23, wherein the sense strand comprises the nucleoside sequence of any one of SEQ ID NOS: 11402-11421, 11442-11445, or 11500-11503.

[1152] 25. The composition of any one of the embodiments 22-24, wherein the sense strand consists of the nucleoside sequence of any one of SEQ ID NOS: 11402-11421, 11442-11445, or 11500-11503.

[1153] 26. The composition of any one of embodiments 22-25, wherein the antisense strand comprises the nucleoside sequence of any one of SEQ ID NOS: 11422-11441, 11446-11449, or 11504-11507, or an antisense strand sequence thereof having 1 or 2 nucleoside substitutions, additions, or deletions.

[1154] 27. The composition of any one of embodiments 22-26, wherein the antisense strand comprises the nucleoside sequence of any one of SEQ ID NOS: 11422-11441, 11446-11449, or 11504-11507.

[1155] 28. The composition of any one of the embodiments 22-27, wherein the antisense strand consists of the nucleoside sequence of any one of SEQ ID NOS: 11422-11441, 11446-11449, or 11504-11507.

[1156] 29. A composition comprising an oligonucleotide that targets angiopoietin like 7 (ANGPTL7) and when administered to a cell decreases expression of ANGPTL7, wherein the oligonucleotide comprises a small interfering RNA (siRNA) comprising a sense strand comprising a nucleoside sequence of any one of SEQ ID NOS: 11377, 11442, 11445, 11500, 11501, 11502, or 11503; and an antisense strand comprising a nucleoside sequence of any one of SEQ ID NOS: 11306, 11446, 11449, 11504, 11505, 11506, or 11507.

[1157] 30. The composition of embodiment 29, wherein the sense strand consists of a nucleoside sequence of any one of SEQ ID NOS: 11377, 11442, 11445, 11500, 11501, 11502, or 11503.

[1158] 31. The composition of embodiment 29 or 30, wherein the antisense strand consists of a nucleoside sequence of any one of SEQ ID NOS: 11306, 11446, 11449, 11504, 11505, 11506, or 11507.

[1159] 32. A pharmaceutical composition comprising:
[1160] (a) a composition of any one of the preceding embodiments; and
[1161] (b) a pharmaceutically acceptable carrier.

[1162] 33. A method of decreasing expression of angiopoietin-like 7 (ANGPTL7) in a cell, the method comprising administering to the cell a composition of any one of the preceding embodiments, thereby decreasing expression of ANGPTL7 in the cell.

[1163] 34. A method of treating an ocular disorder in a subject in need thereof, the method comprising administering to the subject a therapeutically effective amount of a composition of any one of the preceding embodiments, thereby treating the ocular disorder in the subject.

[1164] 35. The method of embodiment 34, wherein the ocular disorder comprises a glaucoma.

[1165] 36. The method of embodiment 34 or 35, wherein the composition decreases intraocular pressure in an eye of the subject relative to a baseline intraocular pressure measurement obtained from the subject prior to administering the composition to the subject.

[1166] 37. The method of any one of embodiments 34-36, wherein the composition decreases intraocular pressure in the eye of the subject by at least 10% relative to the baseline intraocular pressure measurement obtained from the subject prior to administering the composition.

### EXAMPLES

[1167] The following non-limiting examples serve to illustrate selected embodiments. It will be appreciated that variations in proportions and alternatives in elements of the components shown will be apparent to those skilled in the art and are within the scope of embodiments presented herein.

### Example 1. Association of ANGPTL7 Protein Altering Variants with IOP and Glaucoma

[1168] Applicant evaluated approximately 30,000,000 imputed variants in 375,000 individuals from the UK Biobank cohort for associations with glaucoma and intraocular pressure (IOP) (see Table 1). Elevated IOP is a primary causal feature and risk factor for glaucoma.

TABLE 1
Definitions and Sample Counts for Evaluated Phenotypes

| Trait | Case Definition | Case # | Control # |
|---|---|---|---|
| Glaucoma | Hospital diagnosis of glaucoma OR | 12,173 | 363,361 |
| | glaucoma surgery or meds OR self- | | |
| | reported history of glaucoma | | |
| IOP | intra-ocular pressure measure | 79,791 | NA |

[1169] Associations were observed between a rare missense variant (rs28991009; minor allele frequency ˜0.0073) within ANGPTL7 and glaucoma and related traits (see Table 2). The major allele of this variant (chr1-11253684-G, hg19) encodes for a glutamine and the minor allele (chr1-11253684-T, hg19) a histidine at amino acid position 175 of the full length ANGPTL7 protein (Gln175His; Q175H). Each copy of the minor (T) allele in carriers of this variant confers an approximately 35% reduction in glaucoma risk compared with non-carriers (p=8.67×10\hat{ }−7; OR=0.65), and a significant association with reduced IOP was observed (p=1.94×10\hat{ }-13; beta=−0.21).

TABLE 2
Association of ANGPTL7 Variant rs28991009
with Glaucoma and Related Traits

| Trait | Variant | Effect Size | P |
|---|---|---|---|
| Glaucoma | rs28991009 | 0.65 (OR) | 8.67E−07 |
| IOP | rs28991009 | −0.21 (Beta) | 1.95E−13 |

[1170] Next, an evaluation of the likely deleterious subset of the directly genotyped protein altering variants in ANTPTL7 was performed, resulting in inclusion of the Q175H missense variant (MAF=0.0073; rs28991009), an R140H missense variant (MAF=0.0024; rs28991002), and an R177Ter stop gain variant (MAF=0.0004; rs143435072). Gene burden tests are used to aggregate rare variants in a gene by functional class that are too rare to be tested individually. Although imputation of array genotypes has improved significantly with the availability of large reference datasets consisting of haplotypes observed in whole genome sequencing studies, imputation of very rare variants remains challenging and can be inaccurate. Individuals carrying predicted ANGPTL7 protein altering variants had a significantly lower IOP when compared to non-carriers (Table 3).

TABLE 3
Association of ANGPTL7 Protein Altering Variants with IOP

| RSID | Function | AAF | REF | ALT | BETA | P |
|---|---|---|---|---|---|---|
| rs28991009 | Missense | 7.27E−03 | G | T | −0.21 | 1.95E−13 |
| | (Q175H) | | | | | |
| rs28991002 | Missense | 2.36E−03 | G | A | −0.18 | 1.88E−04 |
| | (R140H) | | | | | |
| rs143435072 | Stop gain | 3.81E−04 | C | T | −0.62 | 1.00E−03 |
| | (R177Ter) | | | | | |

[1171] The protective (i.e. IOP-lowering) associations with Q175H and R140H were directionally consistent with the predicted loss of function variant R177Ter; in other words, the minor allele of all three variants was associated with decreased IOP. By inference, these data indicate that loss of function (LOF) of ANGPTL7 protects against the development of ocular hypertension and glaucoma. Accordingly, in some cases therapeutic inhibition or modulation of ANGPTL7 may be an effective genetically-informed method of treatment for these diseases.

### Example 2. Protective (i.e. IOP-lowering) Variants in ANGPTL7 Result in Less Secreted ANGPTL7 Protein

[1172] Pre-mRNA or protein-coding sequence (CDS) expression constructs encoding for wild type, Q175H, R140H and R177Ter proteins were generated (FIG. 1). The pre-mRNA or CDS of the protein coding transcript (ENST00000376819) of ANGPTL7 was cloned into a pcDNA3.1(+) vector driven by a CMV promoter. Note that the pre-mRNA constructs contained exons, introns, and 5′ and 3′ UTRs, while the CDS constructs contained only exons. The purpose in utilizing pre-mRNA constructs is that they allow for evaluation of alternatively spliced transcripts. Empty vector and a GFP tagged vector were used as controls. For Q175H (rs28991009) expression constructs, the T allele replaces the G allele at DNA sequence position chr1:11253684 (human genome build 37). This creates a Gln175His amino acid substitution in the ANGPTL7 protein. For R140H (rs28991002) expression constructs, the A allele replaces the G allele at DNA position chr1:11252369 (human genome build 37). For R177Ter (rs143435072) expression constructs, the T allele replaces the C allele at DNA sequence position chr1:11253688 (human genome build 37). This creates an Arg177Ter premature stop codon.

[1173] Transfections of HEK293 cells were optimized using the GFP-tagged and ANGPTL7 WT and Q175H pre-mRNA constructs. Briefly, HEK293 cells were plated at 10,000 cells/well in a 96-well plate in complete growth media and grown for 48 hours followed by a media change. Cells were then transfected with 50 ng or 100 ng of plasmid DNA and 0.15 ul/well or 0.30 ul/well of TransIT-2020 or 0.20 ul/well or 0.40 ul/well Lipofectamine LTX reagents. Cells were incubated for 60 hours, and then either imaged for GFP fluorescence (see FIG. 2) or harvested with Cells-to-Ct reagent and qPCR used to assess ANGPTL7 expression (see FIG. 3). The GFP vector transfection confirmed high transfection efficiency with TransIT-2020 reagent and the qPCR assay confirmed that both the wild-type and Q175H constructs produce ANGPTL7.

[1174] To evaluate, in parallel, the effects of the Q175H, R140H and R177Ter IOP-lowering variants on mRNA and protein expression levels, wild-type and variant constructs were transiently transfected and expressed in HEK293 cells. ANGPTL7 mRNA expression in empty vector transfected HEK293 cells was negligible, while expression from the plasmid constructs was robust and equivalent between the wild-type and variant (Q175H, R140H and R177Ter) transfected cells (FIG. 4).

[1175] Cell lysates and media from transfected cells were assayed to evaluate intracellular and secreted ANGPTL7 protein by western blot (FIG. 5). In empty vector transfected HEK293 cells, ANGPTL7 was not detectable by western blot. In cells transfected with the Q175H construct, ANGPTL7 was markedly reduced in the medium and increased in the cell lysate, suggesting a secretion defect. No protein was detected in lysates or media from cells transfected with the R177Ter construct, in spite of mRNA levels that are equivalent to wild type, suggesting degradation at the protein level rather than nonsense mediated decay. There was no apparent difference between wild type and R140H in either secreted or intracellular protein abundance by western blot.

[1176] Western blot results were validated using a quantitative ELISA assay (FIG. 6). Q175H protein was 6.8-fold more abundant in the cell lysate compared to wild-type, whereas the wild-type protein was 3.3-fold more abundant in the media. This results in a heavily skewed ratio of protein in the media versus lysate when comparing wild-type and Q175H missense protein (˜22:1 ratio) (FIG. 7). The R140H protein demonstrated a lower secretion ratio than wild type, though this difference was modest. Protein was below the ELISA limit of detection in both the media and cell lysate for cells transfected with the R177Ter construct, consistent with the western blot results.

[1177] Similar experiments were performed using CDS constructs rather than pre-mRNA constructs, and results were equivalent to those for the pre-mRNA constructs, as demonstrated by western Blot (FIG. 8).

[1178] Therefore, experimental evaluation of ANGPTL7 proteins demonstrates that genetic variants in ANGPTL7 that are observed to lower IOP and protect from ocular hypertension and glaucoma result in reduced intracellular and/or extracellular ANGPTL7 protein, thereby confirming utility of inhibiting or modulating ANGPTL7 for treatment of these diseases.

### Example 3. RNA Synthesis and Duplex Annealing

[1179] 1. Oligonucleotide Synthesis:

[1180] All oligonucleotides are synthesized on an AKTA oligopilot synthesizer or an ABI 394 synthesizer. Commercially available controlled pore glass solid support (dT-CPG, 500A, Prime Synthesis) and RNA phosphoramidites with standard protecting groups, 5′-O-dimethoxytrityl N6-benzoyl-2′-t-butyldimethylsilyl-adenosine-3′-O—N,N′-diisopropyl-2-cyanoethylphosphoramidite, 5′-O-dimethoxytrityl-N4-acetyl-2′-t-butyldimethylsilyl-cytidine-3′-O—N,N′-diisopropyl-2-cyanoethylphosphoramidite, 5′-O-dimethoxytrityl-N2-isobutryl-2′-t-butyldimethylsilyl-guanosine-3′-O—N,N′-diisopropyl-2-cyanoethylphosphoramidite, and 5′-O-dimethoxytrityl-2′-t-butyldimethylsilyl-uridine-3′-O—N,N′-diisopropyl-2-cyanoethylphosphoramidite (Pierce Nucleic Acids Technologies) are used for the oligonucleotide synthesis unless otherwise specified. The 2′-F phosphoramidites, 5′-O-dimethoxytrityl-N4-acetyl-2′-fluro-cytidine-3′-O—N,N′-diisopropyl-2-cyanoethyl-phosphoramidite and 5′-O-dimethoxytrityl-2′-fluro-uridine-3′-O—N,N′-diisopropyl-2-cyanoethyl-phosphoramidite are purchased from (Promega). All phosphoramidites are used at a concentration of 0.2M in acetonitrile (CH3CN) except for guanosine which is used at 0.2M concentration in 10% THF/ANC (v/v). Coupling/recycling time of 16 minutes is used. The activator is 5-ethyl thiotetrazole (0.75M, American International Chemicals), for the PO-oxidation Iodine/Water/Pyridine is used and the PS-oxidation PADS (2%>) in 2,6-lutidine/ACN (1:1 v/v) is used.

[1181] 2. Deprotection-1 (Nucleobase Deprotection)

[1182] After completion of synthesis, the support is transferred to a 100 ml glass bottle (VWR). The oligonucleotide is cleaved from the support with simultaneous deprotection of base and phosphate groups with 80 mL of a mixture of ethanolic ammonia [ammonia:ethanol (3:1)] for 6.5 h at 55° C. The bottle is cooled briefly on ice and then the ethanolic ammonia mixture is filtered into a new 250 ml bottle. The CPG is washed with 2×40 mL portions of ethanol/water (1:1 v/v). The volume of the mixture is then reduced to ˜30 ml by roto-vap. The mixture is then frozen on dry ice and dried under vacuum on a speed vac.

[1183] 3. Deprotection-II (Removal of 2′ TBDMS group)

[1184] The dried residue is resuspended in 26 ml of triethylamine, triethylamine trihydro fluoride (TEA.3HF) or pyridine-HF and DMSO (3:4:6) and heated at 60° C. for 90 minutes to remove the tert-butyldimethylsilyl (TBDMS) groups at the 2′ position. The reaction is then quenched with 50 ml of 20 mM sodium acetate and pH adjusted to 6.5, and stored in freezer until purification.

[1185] 4. Analysis

[1186] The oligonucleotides are analyzed by high-performance liquid chromatography (HPLC) prior to purification and selection of buffer and column depends on nature of the sequence and or conjugated ligand.

[1187] 5. HPLC Purification

[1188] The ligand conjugated oligonucleotides are purified reverse phase preparative HPLC. The unconjugated oligonucleotides are purified by anion-exchange HPLC on a TSK gel column packed in house. The buffers are 20 mM sodium phosphate (pH 8.5) in 10% CH3CN (buffer A) and 20 mM sodium phosphate (pH 8.5) in 10% CH3CN, 1M NaBr (buffer B). Fractions containing full-length oligonucleotides are pooled, desalted, and lyophilized. Approximately 0.15 OD of desalted oligonucleotides are diluted in water to 150 μL and then pipetted in special vials for CGE and LC/MS analysis.

[1189] Compounds are finally analyzed by LC-ESMS and CGE.

[1190] 6. siRNA Preparation

[1191] For the preparation of siRNA, equimolar amounts of sense and antisense strand are heated in 1×PBS at 95° C. for 5 min and slowly cooled to room temperature.

[1192] Integrity of the duplex is confirmed by HPLC analysis.

### Example 4: Selection of Sequences in Order to Identify Therapeutic siRNAs to Modulate Expression of the ANGPTL7 mRNA

[1193] Screening sets were defined based by bioinformatic analysis. The therapeutic siRNA molecule had to target human ANGPTL7 as well as the ANGPTL7 sequence of at least one toxicology-relevant species, in this case, the non-human primates (NHP) rhesus and cynomolgus monkeys. The key drivers for the design of the screening set were predicted specificity of the siRNAs against the transcriptome of the relevant species as well as cross-reactivity between species. Predicted specificity in human, rhesus monkey, cynomolgus monkey, mouse, rat and dog was determined for sense (S) and antisense (AS) strand. These were assigned a “specificity score” which considers the likelihood of unintended downregulation of any other transcript by full or partial complementarity of an siRNA strand (up to 4 mismatches within positions 2-18) as well as the number and positions of mismatches. Thus, the predicted most likely off-target(s) for antisense and sense strand of each siRNA can be identified. In addition, the number of potential off-targets is used as an additional specificity factor in the specificity score. It is preferable to identify siRNAs with high specificity and a low number of predicted off-targets.

[1194] In addition to selecting siRNA sequences with high sequence specificity to ANGPTL7 mRNA, siRNA sequences within the seed region were analyzed for similarity to seed regions of known miRNAs. siRNAs can function in a miRNA like manner via base-pairing with complementary sequences within the 3′-UTR of mRNA molecules. The complementarity typically encompasses the 5′-bases at positions 2-7 of the miRNA (seed region). In order to circumvent siRNAs to act via functional miRNA binding sites, siRNA strands are avoided that contain natural miRNA seed regions. Seed regions identified in miRNAs from human, mouse, rat, rhesus monkey, dog, rabbit and pig are referred to as “conserved”. Combining the “specificity score” with miRNA seed analysis yields the “specificity category”. This is divided into categories 1-4, with 1 having the highest specificity and 4 having the lowest specificity. Each strand of the siRNA is assigned to a specificity category.

[1195] Species cross-reactivity was assessed for human, cynomolgus monkey, rhesus monkey, mouse, rat, dog, and rabbit. The analysis was based on a canonical siRNA design using 19 bases and 17 bases (without considering positions 1 and 19) for cross-reactivity. Full match as well as single mismatch analysis was included.

[1196] Analysis of the human Single Nucleotide Polymorphism (SNP) database (NCBI-DB-SNP) to identify siRNAs targeting regions with known SNPs was also carried out in order to identify siRNAs that may be non-functional in individuals containing the SNP. Information regarding the positions of SNPs within the target sequence as well as minor allele frequency (MAF) in case data was obtained in this analysis.

[1197] Initial analysis of the relevant ANGPTL7 mRNA sequence revealed few sequences can be identified that fulfil the specificity requirements and at the same time target ANGPTL7 mRNA in all relevant species. Therefore, it was decided to design independent screening subsets for the therapeutic siRNAs.

[1198] All siRNAs in these subsets recognize the human ANGPTL7 sequence, as a human cell culture system was selected for determination of in vitro activity. Therefore, all siRNAs in these subsets can be used to target human ANGPTL7 in a therapeutic setting.

[1199] The number of 19mer sequences that can be derived from human ANGPTL7 mRNA (NM 021146.4) without consideration of specificity or species cross-reactivity is 2,206 (sense strand SEQ ID NOS: 1-2206). This set would encompass all possible ANGPTL7 siRNA sequences.

[1200] Prioritizing sequences for target specificity, species cross-reactivity, miRNA seed region sequences and SNPs as described above yields siRNA subset A. This subset is composed of 207 siRNAs with sense strand SEQ ID NOS: 7, 39, 42, 92, 93, 94, 95, 98, 99, 103, 112, 113, 114, 115, 117, 118, 119, 120, 124, 125, 127, 206, 207, 227, 257, 271, 272, 480, 487, 488, 489, 490, 491, 492, 493, 497, 498, 499, 501, 579, 583, 584, 587, 588, 592, 593, 594, 596, 598, 600, 601, 602, 603, 604, 605, 606, 629, 630, 634, 636, 637, 642, 645, 646, 649, 652, 657, 658, 739, 740, 741, 742, 743, 751, 756, 804, 813, 817, 819, 845, 846, 849, 852, 871, 872, 873, 874, 875, 876, 878, 879, 881, 905, 906, 907, 908, 915, 916, 917, 918, 919, 920, 923, 943, 944, 948, 952, 953, 958, 960, 974, 976, 977, 979, 982, 983, 984, 985, 986, 988, 989, 990, 991, 992, 993, 997, 1000, 1001, 1002, 1003, 1004, 1009, 1011, 1016, 1020, 1021, 1085, 1086, 1087, 1088, 1092, 1094, 1097, 1105, 1107, 1131, 1132, 1133, 1134, 1138, 1140, 1197, 1198, 1199, 1201, 1202, 1260, 1262, 1263, 1264, 1424, 1425, 1427, 1429, 1430, 1434, 1435, 1436, 1438, 1460, 1463, 1524, 1525, 1527, 1528, 1530, 1532, 1533, 1537, 1538, 1539, 1541, 1639, 1640, 1654, 1691, 1692, 1693, 1694, 1762, 1764, 1765, 1794, 1795, 1796, 1797, 1798, 1968, 1969, 2030, 2085, 2087, 2089, 2091, 2095, 2099, and 2192.

[1201] The siRNAs in siRNA subset A has the following characteristics:
[1202] 1. Cross-reactivity: With 19mer in human ANGPTL7 mRNA, with 17mer/19mer in NHP ANGPTL7
[1203] 2. Specificity category: For human and NHP: -AS2 or better, SS3 or better miRNA seeds: AS+SS strand: —seed region not conserved in human, mouse, and rat and not present in >4 species
[1204] 3. Off-target frequency: ≤20 human off-targets matched with 2 mismatches by antisense strand
[1205] 4. SNPs: siRNA target sites do not harbor SNPs with a MAF ≥1% (pos. 2-18)

[1206] The siRNA sequences in siRNA subset A can further be selected for more stringent specificity to yield siRNA subset B. SiRNA subset B is composed of 173 siRNAs with sense strand SEQ ID NOS: 7, 39, 92, 93, 94, 95, 98, 99, 112, 113, 114, 115, 117, 118, 119, 120, 124, 125, 127, 207, 257, 271, 272, 487, 488, 489, 490, 491, 492, 493, 497, 498, 499, 501, 579, 583, 587, 588, 593, 594, 596, 598, 600, 601, 602, 603, 604, 605, 606, 629, 630, 634, 636, 637, 642, 645, 646, 649, 652, 739, 740, 741, 742, 743, 804, 813, 817, 845, 849, 852, 871, 872, 873, 874, 875, 876, 878, 879, 881, 905, 906, 907, 908, 915, 916, 917, 918, 919, 920, 923, 944, 952, 953, 958, 960, 974, 976, 977, 979, 982, 984, 985, 989, 990, 991, 992, 993, 997, 1000, 1001, 1002, 1003, 1004, 1009, 1016, 1021, 1085, 1086, 1087, 1088, 1092, 1094, 1097, 1105, 1107, 1131, 1132, 1133, 1134, 1138, 1140, 1197, 1198, 1199, 1201, 1202, 1262, 1263, 1424, 1425, 1427, 1429, 1430, 1434, 1435, 1436, 1460, 1463, 1524, 1525, 1527, 1528, 1530, 1532, 1533, 1537, 1538, 1539, 1541, 1639, 1654, 1691, 1692, 1764, 1765, 1794, 1795, 1796, 1797, 1798, 1968, 2091, and 2095.

[1207] The siRNAs in siRNA subset B has the following characteristics:
[1208] 1. Cross-reactivity: With 19mer in human ANGPTL7 mRNA, with 17mer/19mer in NHP ANGPTL7
[1209] 2. Specificity category: For human and NHP: -AS2 or better, SS3 or better miRNA seeds: AS+SS strand: —seed region not conserved in human, mouse, and rat and not present in >4 species
[1210] 3. Off-target frequency: ≤15 human off-targets matched with 2 mismatches by antisense strand
[1211] 4. SNPs: siRNA target sites do not harbor SNPs with a MAF ≥1% (pos. 2-18)

[1212] The siRNA sequences in siRNA subset B can further be selected for absence of seed regions in the AS strand that are identical to a seed region of known human miRNA to yield siRNA subset C. SiRNA subset C is composed of 120 siRNAs with sense strand SEQ ID NOS: 7, 39, 92, 94, 113, 114, 115, 117, 118, 119, 120, 127, 207, 257, 271, 272, 488, 489, 490, 498, 499, 501, 579, 587, 588, 593, 594, 596, 600, 601, 605, 606, 629, 630, 636, 642, 645, 646, 739, 740, 741, 742, 743, 813, 845, 849, 871, 872, 873, 878, 879, 881, 905, 906, 907, 908, 916, 917, 918, 919, 952, 958, 976, 979, 982, 984, 989, 990, 991, 992, 993, 1000, 1002, 1003, 1004, 1009, 1016, 1087, 1088, 1092, 1094, 1097, 1105, 1107, 1131, 1132, 1133, 1134, 1198, 1199, 1201, 1202, 1262, 1424, 1427, 1434, 1435, 1463, 1524, 1525, 1527, 1528, 1530, 1532, 1533, 1537, 1538, 1541, 1639, 1691, 1692, 1764, 1765, 1794, 1796, 1797, 1798, 1968, 2091, and 2095.

[1213] The siRNAs in siRNA subset C has the following characteristics:
[1214] 1. Cross-reactivity: With 19mer in human ANGPTL7 mRNA, with 17mer/19mer in NHP ANGPTL7
[1215] 2. Specificity category: For human and NHP: -AS2 or better, SS3 or better miRNA seeds: AS+SS strand: —seed region not conserved in human, mouse, and rat and not present in >4 species. AS strand: —seed region not identical to seed region of known human miRNA
[1216] 3. Off-target frequency: ≤15 human off-targets matched with 2 mismatches by antisense strand
[1217] 4. SNPs: siRNA target sites do not harbor SNPs with a MAF ≥1% (pos. 2-18)

[1218] The siRNA sequences in siRNA subset C can also be selected for absence of seed regions in the AS or S strands that are identical to a seed region of known human miRNA to yield siRNA subset D. SiRNA subset D is composed of 90 siRNAs with sense strand SEQ ID NOS: 92, 113, 115, 119, 120, 127, 488, 490, 499, 579, 587, 588, 592, 593, 594, 600, 601, 605, 606, 630, 642, 657, 658, 740, 742, 743, 813, 846, 871, 872, 878, 881, 905, 907, 916, 917, 918, 919, 943, 948, 958, 979, 982, 983, 984, 989, 990, 991, 992, 1000, 1002, 1003, 1004, 1016, 1020, 1087, 1088, 1097, 1105, 1107, 1131, 1132, 1133, 1134, 1199, 1202, 1260, 1262, 1264, 1427, 1435, 1438, 1463, 1524, 1525, 1527, 1528, 1532, 1538, 1541, 1639, 1692, 1762, 1765, 1794, 1797, 1968, 2030, 2095, and 2192.

[1219] The siRNAs in siRNA subset D has the following characteristics:
[1220] 1. Cross-reactivity: With 19mer in human ANGPTL7 mRNA, with 17mer/19mer in NHP ANGPTL7
[1221] 2. Specificity category: For human and NHP: -AS2 or better, SS3 or better miRNA seeds: AS+SS strand: —seed region not conserved in human, mouse, and rat and not present in >4 species. AS+SS strand: —seed region not identical to seed region of known human miRNA
[1222] 3. Off-target frequency: ≤20 human off-targets matched with 2 mismatches by antisense strand
[1223] 4. SNPs: siRNA target sites do not harbor SNPs with a MAF ≥1% (pos. 2-18)

[1224] The siRNA sequences in siRNA subset D can further be selected for more stringent specificity to yield siRNA subset E. SiRNA subset E is composed of 76 siRNAs with sense strand SEQ ID NOS: 92, 113, 115, 119, 120, 127, 488, 490, 499, 579, 587, 588, 593, 594, 600, 601, 605, 606, 630, 642, 740, 742, 743, 813, 871, 872, 878, 881, 905, 907, 916, 917, 918, 919, 958, 979, 982, 984, 989, 990, 991, 992, 1000, 1002, 1003, 1004, 1016, 1087, 1088, 1097, 1105, 1107, 1131, 1132, 1133, 1134, 1199, 1202, 1262, 1427, 1435, 1463, 1524, 1525, 1527, 1528, 1532, 1538, 1541, 1639, 1692, 1765, 1794, 1797, 1968, and 2095.

[1225] The siRNAs in siRNA subset E has the following characteristics:
[1226] 1. Cross-reactivity: With 19mer in human ANGPTL7 mRNA, with 17mer/19mer in NHP ANGPTL7
[1227] 2. Specificity category: For human and NHP: -AS2 or better, SS3 or better miRNA seeds: AS+SS strand: —seed region not conserved in human, mouse, and rat and not present in >4 species. AS+SS strand: —seed region not identical to seed region of known human miRNA
[1228] 3. Off-target frequency: ≤15 human off-targets matched with 2 mismatches by antisense strand
[1229] 4. SNPs: siRNA target sites do not harbor SNPs with a MAF ≥1% (pos. 2-18)

### Example 5. siRNA-Mediated Modulation of ANGPTL7 and Effects on Intraocular Pressure in Mice

[1230] In this experiment, C57BL/6J mice are used to evaluate the effect of siRNA inhibition of ANGPTL7 on IOP.

[1231] Adult (12 weeks old) C57BL/6J mice are obtained from the Jackson Laboratory (Bar Harbor, ME). The animals are kept in environmentally controlled rooms under specific pathogen-free conditions (temperature, 20-26° C.); humidity, 30-70%) with a 12-hour light-dark cycle for 2 weeks before use. Food and water are available ad libitum. All animals are used in accordance with animal care guidelines.

[1232] Mice are divided into 7 groups. All treatments are applied to both eyes. Group 1 (n=6) is treated with vehicle. Group 2 (n=6) is treated with a negative control siRNA. Groups 3-7 (n=6) are treated with an ANGPTL7-targeting siRNA. Vehicle and siRNAs are delivered via intravitreal injection.

[1233] The ANGPTL7 siRNA has the following sequence: sense strand 5′ GUACAACUGCUGCACAGACUU 3′ (SEQ ID NO:11089), antisense strand 5′ GUCUGUGCAGCAGUUGUACUU 3′ (SEQ ID NO: 11090). Some preferred siRNA sequences may include any one of ETD00342 (sense strand 5′ CfsasAfaGfgUfGfGfcUfaCfuGfgUfaAfsusu 3′ (SEQ ID NO: 11172), antisense strand 5′ usUfsaCfcAfgUfaGfccaCfcUfuUfgsusu 3′ (SEQ ID NO: 11292)), ETD00343 (sense strand 5′ AfsasGfgUfgGfCfUfaCfuGfgUfaCfaAfsusu 3′ (SEQ ID NO: 11173), antisense strand 5′ usUfsgUfaCfcAfgUfagcCfaCfcUfususu 3′ (SEQ ID NO: 11293)), ETD00344 (sense strand 5′ GfsusGfgCfuAfCfUfgGfuAfcAfaCfuAfsusu 3′ (SEQ ID NO: 11174), antisense strand 5′ usAfsgUfuGfuAfcCfaguAfgCfcAfcsusu 3′ (SEQ ID NO: 11294)), ETD00345 (sense strand 5′ UfsgsGfuAfcAfAfCfuGfcUfgCfaCfaAfsusu 3′ (SEQ ID NO: 11175), antisense strand 5′ usUfsgUfgCfaGfcAfguuGfuAfcCfasusu 3′ (SEQ ID NO: 11295)) ETD00346 (sense strand 5′ GfsusAfcAfaCfUfGfcUfgCfaCfaGfaAfsusu 3′ (SEQ ID NO: 11176), antisense strand 5′ usUfscUfgUfgCfaGfcagUfuGfuAfcsusu 3′ (SEQ ID NO: 11296)), ETD00910 (sense strand 5′ CfsasAfcCfaGfAfUfuGfaCfaUfcAfuGfsusu 3′ (SEQ ID NO: 11520), antisense strand 5′ csAfsuGfaUfgUfcAfaucUfgGfuUfgsusu 3′ (SEQ ID NO: 11524)), or ETD00914 (sense strand 5′ CfsasAfaCfaUfCfCfuCfaGfuCfaAfaAfsusu 3′ (SEQ ID NO: 11521), antisense strand 5′ usUfsuUfgAfcUfgAfggaUfgUfuUfgsusu 3′ (SEQ ID NO: 11525)). Some embodiments include any one of ETD00342, ETD00343, ETD00344, ETD00345, ETD00346, ETD00910, or ETD00914, but without the modification patterns of any of SEQ ID NOs: 11172-11176 or 11292-11296, 11520, 11521, 11524, or 11525, or with different modifications or modification patterns than those SEQ ID NOs. A hydrophobic moiety, such as cholesterol, may also be attached to the siRNA. A ligand that binds to receptors on the cell surface, such as RGD to integrins, may also be attached to the siRNA. Hydrophobic groups may be combined with cell-targeting ligands to increase cellular uptake. The non-targeting control siRNA has the following sequence: sense strand 5′ GUUGUACAGCAUGCGGAGAUU 3′ (SEQ ID NO: 11091), antisense strand 5′ UCUCCGCAUGCUGUACAACUU 3′ (SEQ ID NO: 11092), or ETD01046 (sense strand 5′ csascaCfaGfUfAfugaacuacugsusu[Chol-TEG] 3′ (SEQ ID NO: 11522), antisense strand 5′ csAfsguaGfuucauacUfgUfgugsusu 3′ (SEQ ID NO: 11526)).

[1234] For intravitreal injection, mice are anesthetized with ketamine/xylazine and pupils are dilated with topical administration of Cyclomydryl. Following sedation and dilation, a total volume of 1 μl per eye is injected into the vitreous at the pars plana using a Hamilton syringe and a 33-gauge needle. The eyes are then rinsed with saline solution and Gentak is applied to the injection site.

[1235] The study length is 55 days. Oligonucleotide treatment (siRNA or scrambled controls) occurs on days 5 and 18.

[1236] IOP is measured on days 1, 3, 6, 9, 13, 16, 20, 23, 27, 30, 34, 37, 41, 44, 48, 51, and 55. Mice are first anesthetized with 2.5% isoflurane supplemented with 2 liters per minute of oxygen in a small chamber. They are subsequently transferred to a platform containing a nose cone providing continuous isoflurane supply. A TonoLab rebound tonometer (iCare) is used to take 3 independent readings, each comprising an automatic average of 6 consecutive measurements. The TonoLab releases a small probe which measures ocular resistance as a function of IOP.

[1237] Mice are euthanized on day 55. Following sedation with ketamine/xylazine, mice are euthanized via intracardial administration of Euthasol. Both eyes from each animal are harvested and dissected along the equator and each hemisphere is placed in RNAlater. Total RNA is extracted from homogenized tissue and reverse transcribed to cDNA using a First-Strand III cDNA Synthesis kit. Normalized cDNA quantification is carried out by real-time TaqMan PCR using fluorescently labeled TaqMan probes/primers sets of selected genes (ANGPTL7, MYOC, COL1A1, COL5A1, VCAN, FN1, and PPIA). Reactions are carried out in 20 μL aliquots using TaqMan Universal PCR Master Mix No AmpErase UNG ran on an ABI Prism 7500 Fast Real-Time PCR System Sequence Detection System and analyzed by the 7500 System software. Relative Quantification (RQ) values between treated and untreated samples are calculated by the formula 2^{-ΔΔCT}, where C_{T} is the cycle at threshold (automatic measurement), ΔC_{T} is C_{T} of the assayed gene minus C_{T} of the endogenous control (PPIA), and ΔΔC_{T} is the ΔC_{T} of the normalized assayed gene in the treated sample minus the ACT of the same gene in the untreated one (calibrator).

### Example 6: siRNA-Mediated Modulation of ANGPTL7 in a Mouse Model of Spontaneous Glaucoma

[1238] In this experiment, the DBA/2J mouse model of glaucoma is used to evaluate the effect of siRNA inhibition of ANGPTL7 on IOP. DBA/J2 mice develop age related IOP increases and retinal nerve damage characteristic of human disease. DBA/2J mice normally demonstrate peak IOP elevation at 8 months of age.

[1239] Adult mice from inbred strains DBA/2J are obtained from the Jackson Laboratory (Bar Harbor, ME). The animals are kept in environmentally controlled rooms under specific pathogen-free conditions (temperature, 20-26° C.); humidity, 30-70%) with a 12-hour light-dark cycle for 2 weeks before use. Food and water are available ad libitum. All animals are used in accordance with animal care guidelines.

[1240] Experiments are performed on 6-month-old mice. Mice are divided into six groups. Group A (n=4) is an untreated control group. Group B (n=4) is treated with ANGPTL7 targeting siRNA via intraocular/intracameral injection into the anterior chamber. Group C (n=4) is treated with a non-targeting control siRNA via intraocular injection into the anterior chamber. Group D (n=4) is treated with vehicle.

[1241] The ANGPTL7 siRNA has the following sequence: sense strand 5′ GUACAACUGCUGCACAGACUU 3′ (SEQ ID NO:11089), antisense strand 5′ GUCUGUGCAGCAGUUGUACUU 3′ (SEQ ID NO: 11090). The non-targeting control siRNA has the following sequence: sense strand 5′ GUUGUACAGCAUGCGGAGAUU 3′ (SEQ ID NO: 11091), antisense strand 5′ UCUCCGCAUGCUGUACAACUU 3′ (SEQ ID NO: 11092), or ETD01046 (sense strand 5′ csascaCfaGfUfAfugaacuacugsusu[Chol-TEG] 3′ (SEQ ID NO: 11522), antisense strand 5′ csAfsguaGfuucauacUfgUfgugsusu 3′ (SEQ ID NO: 11526)). Some preferred siRNA sequences may include any one of ETD00342 (sense strand 5′ CfsasAfaGfgUfGfGfcUfaCfuGfgUfaAfsusu 3′ (SEQ ID NO: 11172), antisense strand 5′ usUfsaCfcAfgUfaGfccaCfcUfuUfgsusu 3′ (SEQ ID NO: 11292)), ETD00343 (sense strand 5′ AfsasGfgUfgGfCfUfaCfuGfgUfaCfaAfsusu 3′ (SEQ ID NO: 11173), antisense strand 5′ usUfsgUfaCfcAfgUfagcCfaCfcUfususu 3′ (SEQ ID NO: 11293)), ETD00344 (sense strand 5′ GfsusGfgCfuAfCfUfgGfuAfcAfaCfuAfsusu 3′ (SEQ ID NO: 11174), antisense strand 5′ usAfsgUfuGfuAfcCfaguAfgCfcAfcsusu 3′ (SEQ ID NO: 11294)), ETD00345 (sense strand 5′ UfsgsGfuAfcAfAfCfuGfcUfgCfaCfaAfsusu 3′ (SEQ ID NO: 11175), antisense strand 5′ usUfsgUfgCfaGfcAfguuGfuAfcCfasusu 3′ (SEQ ID NO: 11295)) ETD00346 (sense strand 5′ GfsusAfcAfaCfUfGfcUfgCfaCfaGfaAfsusu 3′ (SEQ ID NO: 11176), antisense strand 5′ usUfscUfgUfgCfaGfcagUfuGfuAfcsusu 3′ (SEQ ID NO: 11296)), ETD00910 (sense strand 5′ CfsasAfcCfaGfAfUfuGfaCfaUfcAfuGfsusu 3′ (SEQ ID NO: 11520), antisense strand 5′ csAfsuGfaUfgUfcAfaucUfgGfuUfgsusu 3′ (SEQ ID NO: 11524)), or ETD00914 (sense strand 5′ CfsasAfaCfaUfCfCfuCfaGfuCfaAfaAfsusu 3′ (SEQ ID NO: 11521), antisense strand 5′ usUfsuUfgAfcUfgAfggaUfgUfuUfgsusu 3′ (SEQ ID NO: 11525)). Some embodiments include any one of ETD00342, ETD00343, ETD00344, ETD00345, ETD00346, ETD00910 or ETD00914 but without the modification patterns of any of SEQ ID NOs: 11172-11176, 11292-11296, 11520, 11521, 11524, or 11525, or with different modifications or modification patterns than those SEQ ID NOs. A hydrophobic moiety, such as cholesterol, may also be attached to the siRNA. A ligand that binds to receptors on the cell surface, such as RGD to integrins, may also be attached to the siRNA. Hydrophobic groups may be combined with cell-targeting ligands to increase cellular uptake.

[1242] For intracameral injections, a topical anesthetic (tetracaine hydrochloride 0.5%, Bausch & Lomb) is applied to the desired eye. 10 μg of siRNA in 1 μl of vehicle is injected using a 36G beveled needle mounted on a 10 μl microsyringe. An UltraMicroPump II (World precision instrument's UMP2 and UMC4) is used to precisely control the volume of injection. The needle is entered at the limbus and care is taken not to traumatize the iris or the lens. Mice with injury to iris or lens are excluded from the study. As the needle is withdrawn after injection, a cotton tip applicator is applied for about 1 minute to prevent aqueous reflux.

[1243] IOP is measured a day prior to injections, and also measured at two-, four-, six- and eight-weeks post-injection. Mice from each group are anaesthetized using intraperitoneal injection (0.1 μl) of ketamine (100 mg/kg) and xylazine (9 mg/kg). One mouse is anaesthetized at a time and IOP is measured as soon as the mouse fails to respond to touch. All care is taken to ensure that the mice are in a similar level of anesthesia when the IOP measurements are made. To measure the IOP, a handheld tonometer (TonoLab, Colonial Medical Supply, Franconia, NH) is used.

[1244] Mice are euthanized after the final, eight-week IOP measurements. Trabecular meshwork tissue is dissected out of the enucleated eyes under a dissecting microscope and prepared for RNA extraction. Total RNA is reverse transcribed to cDNA using a First-Strand III cDNA Synthesis kit. Normalized cDNA quantification is carried out by real-time TaqMan PCR using fluorescently labeled TaqMan probes/primers sets of selected genes (ANGPTL7, MYOC, COL1A1, COL5A1, VCAN, FN1, and PPIA). Reactions are carried out in 20 μL aliquots using TaqMan Universal PCR Master Mix No AmpErase UNG run on an ABI Prism 7500 Fast Real-Time PCR System Sequence Detection System and analyzed by the 7500 System software. Relative Quantification (RQ) values between treated and untreated samples are calculated by the formula 2^{-ΔΔCT}, where C_{T} is the cycle at threshold (automatic measurement), ΔC_{T} is C_{T} of the assayed gene minus C_{T} of the endogenous control (PPIA), and ΔΔC_{T} is the ΔC_{T} of the normalized assayed gene in the treated sample minus the ΔC_{T} of the same gene in the untreated one (calibrator).

### Example 7: Chemically Modified ANGPTL7 siRNAs

[1245] The siRNAs targeting ANGPTL7 can be synthesized with chemical modifications with the sense strand having the pattern 5′ NfsnsNfnNfnNfNfNfnNfnNfnNfnNfnNfsnsn 3′ (Modification pattern 1S, SEQ ID NO: 11381) and the antisense strand having the pattern nsNfsnNfnNfnNfnNfnnnNfnNfnNfnsnsn 3′ (Modification pattern 1AS, SEQ ID NO: 11386). “N” can be any nucleoside (for example ribose, deoxyribose, or derivatives thereof), “Nf” is a 2′-fluoro-modified nucleoside, “n” is a 2′-O-methyl modified nucleoside, and “s” is a phosphorothioate linkage. In addition, adenosine can be placed at position 19 in the sense strand and uridine at position 1 in the antisense strand. Some siRNAs that may include these chemical modifications comprise sequences of any of SEQ ID NOs: 11093-11376.

[1246] The siRNAs targeting ANGPTL7 can also be synthesized with chemical modifications with the sense strand having the pattern of modifications 5′ nsnsnnNfnNfNfNfnnnnnnnnnnsnsn (SEQ ID NO: 11382) and antisense strand having the pattern of modifications 5′ nsNfsnnnNfnnnnnnnNfnNfnnnsnsn 3′ (SEQ ID NO: 11388). “N” can be any nucleoside (for example ribose, deoxyribose, or derivatives thereof), “Nf” is a 2′-fluoro-modified nucleoside, “n” is a 2′-O-methyl modified nucleoside, and “s” is a phosphorothioate linkage. In addition, adenosine can be placed at position 19 in the sense strand and uridine at position 1 in the antisense strand.

### Example 8. Screening ANGPTL7 siRNAs for Activity in Human Cells in Culture

[1247] Chemically modified ANGPTL7 siRNAs cross reactive for human and non-human primate and derived from sequences in siRNA subset C were assayed for ANGPTL7 mRNA knockdown activity in cells in culture. ARPE-19 (ATCC® CRL-2302™) cells were seeded in 96-well tissue culture plates at a cell density of 7,500 cells per well in DMEM:F12 (ATCC Catalog No. 30-2006) supplemented with 10% fetal bovine serum and incubated overnight in a water-jacketed, humidified incubator at 37° C. in an atmosphere composed of air plus 5% carbon dioxide. The ANGPTL7 siRNAs were individually transfected into ARPE-19 cells in duplicate wells at 10 nM final concentration using 0.3 μL Lipofectamine RNAiMax (Fisher) per well. Silencer Select Negative Control #1 (ThermoFisher, Catalog #4390843) was transfected at 10 nM final concentration as a control. After incubation for 48 hours at 37° C., total RNA was harvested from each well and cDNA prepared using TaqMan® Fast Advanced Cells-to-CT™ Kit (ThermoFisher, Catalog #A35374) according to the manufacturer's instructions. The level of ANGPTL7 mRNA from each well was measured in triplicate by real-time qPCR on an Applied Biosystems 7500 Fast Real-Time PCR machine using TaqMan Gene Expression Assay for human ANGPTL7 (ThermoFisher, assay #Hs00221727_m1). The level of PPIA mRNA was measured using TaqMan Gene Expression Assay (ThermoFisher, assay #Hs99999904_m1) and used to determine relative ANGPTL7 mRNA levels in each well using the delta-delta Ct method. All data were normalized to relative ANGPTL7 mRNA levels in untreated ARPE-19 cells. Results are shown in Table 4.

TABLE 4
Knockdown Activity of ANGPLT7-Specific
siRNAs at 10 nM in Human ARPE-19 Cells

| | Sense | Antisense | Relative |
|---|---|---|---|
| | Strand | Strand | ANGPTL7 |
| siRNA name | (SEQ ID NO) | (SEQ ID NO) | Expression |
| Untreated Cells | — | — | 1.00 |
| Negative Control | — | — | 0.67 |
| siRNA | | | |
| ETD00263 | 11093 | 11213 | 0.72 |
| ETD00264 | 11094 | 11214 | 0.34 |
| ETD00265 | 11095 | 11215 | 0.33 |
| ETD00266 | 11096 | 11216 | 0.26 |
| ETD00267 | 11097 | 11217 | 0.24 |
| ETD00268 | 11098 | 11218 | 0.29 |
| ETD00269 | 11099 | 11219 | 0.18 |
| ETD00270 | 11100 | 11220 | 0.09 |
| ETD00271 | 11101 | 11221 | 0.23 |
| ETD00272 | 11102 | 11222 | 0.22 |
| ETD00273 | 11103 | 11223 | 0.19 |
| ETD00274 | 11104 | 11224 | 0.09 |
| ETD00275 | 11105 | 11225 | 0.14 |
| ETD00276 | 11106 | 11226 | 0.18 |
| ETD00277 | 11107 | 11227 | 0.77 |
| ETD00278 | 11108 | 11228 | 0.58 |
| ETD00279 | 11109 | 11229 | 0.26 |
| ETD00280 | 11110 | 11230 | 0.15 |
| ETD00281 | 11111 | 11231 | 1.64 |
| ETD00282 | 11112 | 11232 | 0.95 |
| ETD00283 | 11113 | 11233 | 0.29 |
| ETD00284 | 11114 | 11234 | 0.54 |
| ETD00285 | 11115 | 11235 | 0.53 |
| ETD00286 | 11116 | 11236 | 0.16 |
| ETD00287 | 11117 | 11237 | 0.80 |
| ETD00288 | 11118 | 11238 | 0.14 |
| ETD00289 | 11119 | 11239 | 0.22 |
| ETD00290 | 11120 | 11240 | 0.60 |
| ETD00291 | 11121 | 11241 | 0.20 |
| ETD00292 | 11122 | 11242 | 0.34 |
| ETD00293 | 11123 | 11243 | 0.25 |
| ETD00294 | 11124 | 11244 | 0.18 |
| ETD00295 | 11125 | 11245 | 0.07 |
| ETD00296 | 11126 | 11246 | 0.06 |
| ETD00297 | 11127 | 11247 | 0.16 |
| ETD00298 | 11128 | 11248 | 0.14 |
| ETD00299 | 11129 | 11249 | 0.33 |
| ETD00300 | 11130 | 11250 | 0.49 |
| ETD00301 | 11131 | 11251 | 0.60 |
| ETD00302 | 11132 | 11252 | 0.17 |
| ETD00303 | 11133 | 11253 | 0.37 |
| ETD00304 | 11134 | 11254 | 0.27 |
| ETD00305 | 11135 | 11255 | 0.36 |
| ETD00306 | 11136 | 11256 | 0.30 |
| ETD00307 | 11137 | 11257 | 0.77 |
| ETD00308 | 11138 | 11258 | 0.93 |
| ETD00309 | 11139 | 11259 | 0.31 |
| ETD00310 | 11140 | 11260 | 0.37 |
| ETD00311 | 11141 | 11261 | 0.84 |
| ETD00312 | 11142 | 11262 | 1.69 |
| ETD00313 | 11143 | 11263 | 0.13 |
| ETD00314 | 11144 | 11264 | 0.24 |
| ETD00315 | 11145 | 11265 | 0.11 |
| ETD00316 | 11146 | 11266 | 0.16 |
| ETD00317 | 11147 | 11267 | 0.14 |
| ETD00318 | 11148 | 11268 | 0.21 |
| ETD00319 | 11149 | 11269 | 0.27 |
| ETD00320 | 11150 | 11270 | 0.11 |
| ETD00321 | 11151 | 11271 | 0.14 |
| ETD00322 | 11152 | 11272 | 0.08 |
| ETD00323 | 11153 | 11273 | 0.32 |
| ETD00324 | 11154 | 11274 | 0.44 |
| ETD00325 | 11155 | 11275 | 0.17 |
| ETD00326 | 11156 | 11276 | 0.18 |
| ETD00327 | 11157 | 11277 | 0.34 |
| ETD00328 | 11158 | 11278 | 0.17 |
| ETD00329 | 11159 | 11279 | 0.08 |
| ETD00330 | 11160 | 11280 | 0.11 |
| ETD00331 | 11161 | 11281 | 0.08 |
| ETD00332 | 11162 | 11282 | 0.17 |
| ETD00333 | 11163 | 11283 | 0.31 |
| ETD00334 | 11164 | 11284 | 0.41 |
| ETD00335 | 11165 | 11285 | 0.06 |
| ETD00336 | 11166 | 11286 | 0.22 |
| ETD00337 | 11167 | 11287 | 0.12 |
| ETD00338 | 11168 | 11288 | 0.19 |
| ETD00339 | 11169 | 11289 | 0.17 |
| ETD00340 | 11170 | 11290 | 0.18 |
| ETD00341 | 11171 | 11291 | 0.13 |
| ETD00342 | 11172 | 11292 | 0.13 |
| ETD00343 | 11173 | 11293 | 0.32 |
| ETD00344 | 11174 | 11294 | 0.22 |
| ETD00345 | 11175 | 11295 | 0.37 |
| ETD00346 | 11176 | 11296 | 0.14 |
| ETD00347 | 11177 | 11297 | 0.20 |
| ETD00348 | 11178 | 11298 | 0.20 |
| ETD00349 | 11179 | 11299 | 0.65 |
| ETD00350 | 11180 | 11300 | 0.34 |
| ETD00351 | 11181 | 11301 | 0.13 |
| ETD00352 | 11182 | 11302 | 0.11 |
| ETD00353 | 11183 | 11303 | 0.11 |
| ETD00354 | 11184 | 11304 | 0.14 |
| ETD00355 | 11185 | 11305 | 0.13 |
| ETD00356 | 11186 | 11306 | 0.10 |
| ETD00357 | 11187 | 11307 | 0.38 |
| ETD00358 | 11188 | 11308 | 0.05 |
| ETD00359 | 11189 | 11309 | 0.11 |
| ETD00360 | 11190 | 11310 | 2.23 |
| ETD00361 | 11191 | 11311 | 0.42 |
| ETD00362 | 11192 | 11312 | 0.61 |
| ETD00363 | 11193 | 11313 | 0.48 |
| ETD00364 | 11194 | 11314 | 0.65 |
| ETD00365 | 11195 | 11315 | 0.24 |
| ETD00366 | 11196 | 11316 | 0.38 |
| ETD00367 | 11197 | 11317 | 0.77 |
| ETD00368 | 11198 | 11318 | 0.16 |
| ETD00369 | 11199 | 11319 | 0.11 |
| ETD00370 | 11200 | 11320 | 0.43 |
| ETD00371 | 11201 | 11321 | 0.35 |
| ETD00372 | 11202 | 11322 | 0.79 |
| ETD00373 | 11203 | 11323 | 0.45 |
| ETD00374 | 11204 | 11324 | 0.34 |
| ETD00375 | 11205 | 11325 | 0.15 |
| ETD00376 | 11206 | 11326 | 0.64 |
| ETD00377 | 11207 | 11327 | 0.29 |
| ETD00378 | 11208 | 11328 | 0.17 |
| ETD00379 | 11209 | 11329 | 0.56 |
| ETD00380 | 11210 | 11330 | 0.36 |
| ETD00381 | 11211 | 11331 | 0.42 |
| ETD00382 | 11212 | 11332 | 0.19 |

“—” untreated ARPE-19 cells;
Negative Control siRNA, Silencer Select Negative Control #1

[1248] A subset of the ANGPTL7 siRNA at were tested in a second screen for activity at 1 nM concentration using ARPE-19 cells and the transfection procedures as described above. Results are shown in Table 5.

TABLE 5
Knockdown Activity of ANGPLT7-Specific
siRNAs at 1 nM in Human ARPE-19 Cell

| | Sense | Antisense | Relative |
|---|---|---|---|
| | Strand | Strand | ANGPTL7 |
| siRNA name | (SEQ ID NO) | (SEQ ID NO) | Expression |
| Untreated Cells | — | — | 1.00 |
| Negative Control | — | — | 1.06 |
| siRNA | | | |
| ETD00269 | 11100 | 11220 | 0.16 |
| ETD00270 | 11143 | 11263 | 0.19 |
| ETD00273 | 11161 | 11281 | 0.27 |
| ETD00276 | 11183 | 11303 | 0.21 |
| ETD00280 | 11186 | 11306 | 0.28 |
| ETD00286 | 11188 | 11308 | 0.43 |
| ETD00291 | 11099 | 11219 | 0.47 |
| ETD00294 | 11103 | 11223 | 0.41 |
| ETD00297 | 11106 | 11226 | 0.45 |
| ETD00302 | 11110 | 11230 | 0.13 |
| ETD00313 | 11116 | 11236 | 0.34 |
| ETD00316 | 11121 | 11241 | 0.31 |
| ETD00318 | 11124 | 11244 | 0.42 |
| ETD00325 | 11127 | 11247 | 0.50 |
| ETD00326 | 11132 | 11252 | 0.67 |
| ETD00328 | 11146 | 11266 | 0.49 |
| ETD00331 | 11148 | 11268 | 0.39 |
| ETD00332 | 11155 | 11275 | 1.09 |
| ETD00338 | 11156 | 11276 | 0.96 |
| ETD00339 | 11158 | 11278 | 0.27 |
| ETD00340 | 11162 | 11282 | 0.31 |
| ETD00347 | 11168 | 11288 | 0.46 |
| ETD00348 | 11169 | 11289 | 0.45 |
| ETD00353 | 11170 | 11290 | 0.53 |
| ETD00356 | 11177 | 11297 | 0.21 |
| ETD00358 | 11178 | 11298 | 0.31 |
| ETD00368 | 11198 | 11318 | 0.48 |
| ETD00375 | 11205 | 11325 | 0.44 |
| ETD00378 | 11208 | 11328 | 0.51 |
| ETD00382 | 11212 | 11332 | 0.28 |

“—” untreated ARPE-19 cells;
Negative Control siRNA, Silencer Select Negative Control #1

### Example 9. Screening ANGPTL7 siRNAs for Activity in Mouse Cells in Culture

[1249] It can be advantageous to possess ANGPTL7 siRNAs that are cross-reactive for human and rodent species. Chemically modified ANGPTL7 siRNAs derived from those that are predicted to be cross-reactive for human and mouse ANGPTL7 were assayed for ANGPTL7 mRNA knockdown activity in mouse cells in culture. C166 (ATCC® CRL-2581™) cells were seeded in 96-well tissue culture plates at a cell density of 10,000 cells per well in DMEM supplemented with 10% fetal bovine serum and incubated overnight in a water-jacketed, humidified incubator at 37° C. in an atmosphere composed of air plus 5% carbon dioxide. The ANGPTL7 siRNAs were individually transfected into C166 cells in duplicate wells at 1 nM and 10 nM final concentration using 0.3 μL Lipofectamine RNAiMax (Fisher) per well. Silencer Select Negative Control #1 (ThermoFisher, Catalog #4390843) was transfected at 10 nM final concentration as a control. After incubation for 48 hours at 37° C., total RNA was harvested from each well and cDNA prepared using TaqMan® Fast Advanced Cells-to-CT™ Kit (ThermoFisher, Catalog #A35374) according to the manufacturer's instructions. The level of ANGPTL7 mRNA from each well was measured in triplicate by real-time qPCR on an Applied Biosystems 7500 Fast Real-Time PCR machine using TaqMan Gene Expression Assay for mouse ANGPTL7 (ThermoFisher, assay #Mm00480431_m1). The level of PPIA mRNA was measured using TaqMan Gene Expression Assay (ThermoFisher, assay #Mm02342430_g1) and used to determine relative ANGPTL7 mRNA levels in each well using the delta-delta Ct method. All data were normalized to relative ANGPTL7 mRNA levels in untreated C166 cells. Results are shown in Table 6. In some embodiments, an oligonucleotide such as an siRNA described herein, that targets human ANGPTL7 is cross-reactive with human, NHP, mouse, rat, and/or dog ANGPTL7 (e.g. any one of ETD00342-ETD00346, or a version thereof with different sequence modifications, or without sequence modifications).

TABLE 6
Knockdown Activity of ANGPLT7-Specific siRNAs
at 1 nM and 10 nM in Mouse C166 cells

| | Sense | Antisense | | |
|---|---|---|---|---|
| | Strand | Strand | Relative ANGPTL7 Expression | |
| | (SEQ | (SEQ | 1 nM | 10 nM |
| siRNA name | ID NO) | ID NO) | siRNA | siRNA |
| Untreated Cells | — | — | 1.00 | — |
| Negative Control | — | — | 0.66 | — |
| siRNA | | | | |
| ETD00241 | 11333 | 11355 | 1.04 | 0.92 |
| ETD00242 | 11334 | 11356 | 0.71 | 0.78 |
| ETD00243 | 11335 | 11357 | 0.85 | 0.83 |
| ETD00244 | 11336 | 11358 | 0.54 | 0.79 |
| ETD00245 | 11337 | 11359 | 0.43 | 0.71 |
| ETD00246 | 11338 | 11360 | 0.59 | 0.83 |
| ETD00247 | 11339 | 11361 | 0.35 | 0.76 |
| ETD00248 | 11340 | 11362 | 0.93 | 0.90 |
| ETD00249 | 11341 | 11363 | 0.67 | 0.90 |
| ETD00250 | 11342 | 11364 | 0.77 | 0.89 |
| ETD00251 | 11343 | 11365 | 0.52 | 0.82 |
| ETD00252 | 11344 | 11366 | 0.44 | 0.77 |
| ETD00253 | 11345 | 11367 | 0.82 | 0.81 |
| ETD00254 | 11346 | 11368 | 0.94 | 0.87 |
| ETD00255 | 11347 | 11369 | 0.76 | 0.83 |
| ETD00256 | 11348 | 11370 | 0.89 | 0.91 |
| ETD00257 | 11349 | 11371 | 0.52 | 0.92 |
| ETD00258 | 11350 | 11372 | 0.89 | 0.94 |
| ETD00259 | 11351 | 11373 | 0.70 | 0.91 |
| ETD00260 | 11352 | 11374 | 0.52 | 0.92 |
| ETD00261 | 11353 | 11375 | 0.55 | 0.89 |
| ETD00262 | 11354 | 11376 | 0.78 | 0.95 |

“—” untreated C166 cells; Negative Control siRNA, Silencer Select Negative Control #1

### Example 10. Determining the IC50 of ANGPTL7 siRNAs in Human ARPE-19 Cells

[1250] The IC50 values for knockdown of ANGPTL7 mRNA by select ANGPTL7 siRNAs were determined in ARPE-19 cells. The ETD00269, ETD00270, ETD00353, ETD00356, ETD00358, ETD00370, ETD00377, ETD00378 and ETD00382 siRNAs were assayed individually at 3 nM, 1 nM, 0.3 nM, 0.1 nM and 0.03 nM. A subset of siRNAs was also assayed at 0.01 nM. The ARPE-19 (ATCC® CRL-2302™) cells were seeded in 96-well tissue culture plates at a cell density of 7,500 cells per well in DMEM supplemented with 10% fetal bovine serum and incubated overnight in a water-jacketed, humidified incubator at 37° C. in an atmosphere composed of air plus 5% carbon dioxide. The ANGPTL7 siRNAs were individually transfected into ARPE-19 cells in triplicate wells using 0.3 μL Lipofectamine RNAiMax (Fisher) per well. Silencer Select Negative Control #1 (ThermoFisher, Catalog #4390843) was transfected at 0.03 and 3 nM final concentration as a control. After incubation for 48 hours at 37° C., total RNA was harvested from each well and cDNA prepared using TaqMan® Fast Advanced Cells-to-CT™ Kit (ThermoFisher, Catalog #A35374) according to the manufacturer's instructions. The level of ANGPTL7 mRNA from each well was measured in triplicate by real-time qPCR on an Applied Biosystems 7500 Fast Real-Time PCR machine using TaqMan Gene Expression Assay for human ANGPTL7 (ThermoFisher, assay #Hs00221727 ml). The level of PPIA mRNA was measured using TaqMan Gene Expression Assay (ThermoFisher, assay #Hs99999904 ml) and used to determine relative ANGPTL7 mRNA levels in each well using the delta-delta Ct method. All data were normalized to relative ANGPTL7 mRNA levels in untreated ARPE-19 cells. Curve fit was accomplish using the [inhibitor] vs. response (three parameters) function in GraphPad Prism software. Results are shown in Table 7, Table 8, and Table 9.

TABLE 7
IC50 Values of ETD00269, ETD00270, ETD00358
and ETD00382 ANGPTL7 siRNAs

| | | | Relative ANGPTL7 | |
|---|---|---|---|---|
| siRNA | [siRNA] | | mRNA Levels | IC50 |
| — | — | | 1.000 | ND |
| Negative Control siRNA | 3 | nM | 0.713 | ND |
| | 0.03 | nM | 0.712 | ND |
| ETD00269 | 3 | nM | 0.156 | 0.23 |
| | 1 | nM | 0.649 | |
| | 0.3 | nM | 0.849 | |
| | 0.1 | nM | 1.469 | |
| | 0.03 | nM | 1.808 | |
| ETD00270 | 3 | nM | 0.305 | 0.044 |
| | 1 | nM | 0.445 | |
| | 0.3 | nM | 0.225 | |
| | 0.1 | nM | 0.720 | |
| | 0.03 | nM | 0.907 | |
| ETD00358 | 3 | nM | 0.129 | 0.15 |
| | 1 | nM | 0.140 | |
| | 0.3 | nM | 0.553 | |
| | 0.1 | nM | 0.936 | |
| | 0.03 | nM | 1.292 | |
| ETD00382 | 3 | nM | 0.316 | 0.28 |
| | 1 | nM | 0.492 | |
| | 0.3 | nM | 0.229 | |
| | 0.1 | nM | 0.205 | |
| | 0.03 | nM | 0.206 | |

TABLE 8
IC50 Values of ETD00353 and ETD00356 ANGPTL7 siRNAs

| | | | Relative ANGPTL7 | |
|---|---|---|---|---|
| siRNA | [siRNA] | | mRNA Levels | IC50 |
| — | — | | 1.000 | ND |
| Negative Control siRNA | 3 | nM | 1.487 | ND |
| | 0.03 | nM | 0.188 | ND |
| ETD00353 | 3 | nM | 0.383 | 1.52 |
| | 1 | nM | 0.772 | |
| | 0.3 | nM | 1.140 | |
| | 0.1 | nM | 1.423 | |
| | 0.03 | nM | 1.257 | |
| | 0.01 | nM | 1.424 | |
| ETD00356 | 3 | nM | 0.107 | 0.12 |
| | 1 | nM | 0.152 | |
| | 0.3 | nM | 0.294 | |
| | 0.1 | nM | 0.712 | |
| | 0.03 | nM | 0.793 | |
| | 0.01 | nM | 1.073 | |

TABLE 9
IC50 Values of ETD00370, ETD00377
and ETD00378 ANGPTL7 siRNAs

| | | | Relative ANGPTL7 | |
|---|---|---|---|---|
| siRNA | [siRNA] | | mRNA Levels | IC50 |
| — | — | | 1.000 | ND |
| Negative Control siRNA | 0.03 | nM | 1.951 | ND |
| | 3 | nM | 1.579 | ND |
| ETD00370 | 3 | nM | 0.251 | 0.49 |
| | 1 | nM | 0.589 | |
| | 0.3 | nM | 0.990 | |
| | 0.1 | nM | 1.736 | |
| | 0.03 | nM | 1.566 | |
| ETD00377 | 3 | nM | 0.358 | 2.64 |
| | 1 | nM | 0.462 | |
| | 0.3 | nM | 0.476 | |
| | 0.1 | nM | 0.548 | |
| | 0.03 | nM | 1.361 | |
| ETD00378 | 3 | nM | 0.281 | 0.17 |
| | 1 | nM | 0.575 | |
| | 0.3 | nM | 1.037 | |
| | 0.1 | nM | 1.570 | |
| | 0.03 | nM | 1.816 | |

### Example 11. Assessing the Extent of Nuclease Resistance of ANGPTL7 siRNAs

[1251] Resistance of select ANGPTL7 siRNAs to nuclease digestion was assessed by incubating the siRNAs in rat liver tritosomes. Each siRNA (7 ng/μL final concentration) was placed into a PCR tube containing a cocktail prepared on ice containing 1× catabolic buffer (Xenotech, Catalog #K5200, Lot#18-1-0698), 0.5× rat tritosomes (Xenotech, Catalog #R0610.LT, Lot #1610405), 0.1 U/4 porcine intestinal heparin (Zageno, Catalog #H3149-10KU). An aliquot was removed, an equal volume of 50 mM EDTA was added, and the sample placed at −80° C. This sample was designated as the 0 hr timepoint. The remainder of the reaction was placed in an Eppendorf Mastercycler Gradient and incubated at 37° C. After incubation for 4 and 24 hours, an aliquot was removed from the reaction and stopped by addition of an equal volume of 50 mM EDTA and placed at −80° C. until analysis by gel electrophoresis. All samples were then thawed on ice and 6×DNA Gel Loading Dye (ThermoFisher Catalog #R0611) was added to 1× final concentration. 20 μL of each sample was loaded onto a 20% polyacrylamide TBE gel (ThermoFisher, Catalog #EC63155BOX). Electrophoresis was carried out at a constant 100V for 75 minutes in an XCell SureLock Mini-Cell Electrophoresis System (ThermoFisher) using 1×TBE (Tris/boric/EDTA) (Fisher, Catalog #FERB52) as the tank buffer. The siRNA was visualized by staining the gel with a 1:10,000 dilution of SYBR Gold (ThermoFisher, Catalog #S-11494) in TBE for 15 minutes at room temperature with rocking. The gel was washed with 1×TBE for 15 minutes and then placed on a FotoPrepl UV transilluminator (Fotodyne). The gel was imaged using the camera app set on MONO on an iPhone 6s with a yellow gel filter (Neewer) placed over the lens. Band intensity was measured using NIH ImageJ using the “Analyze: Gels” function. The remaining siRNA percent was normalized to the value obtained at the 0 hr timepoint for that siRNA. Results are shown in Table 10. By using this assay, we were able to determine that some siRNAs are more resistant to nuclease digestion with more remaining intact over time compared with other siRNAs with the same modification pattern.

TABLE 10
Resistance of ANGPTL7 siRNAs to Nucleases
Present in Rat Liver Tritosomes

| siRNA | Timepoint (hr) | % remaining |
|---|---|---|
| ETD00269 | 0 | 100% |
| | 4 | 109% |
| | 24 | 69% |
| ETD00270 | 0 | 100% |
| | 4 | 69% |
| | 24 | 47% |
| ETD00276 | 0 | 100% |
| | 4 | 103% |
| | 24 | 78% |
| ETD00302 | 0 | 100% |
| | 4 | 68% |
| | 24 | 26% |
| ETD00353 | 0 | 100% |
| | 4 | 75% |
| | 24 | 34% |
| ETD00356 | 0 | 100% |
| | 4 | 66% |
| | 24 | 29% |
| ETD00358 | 0 | 100% |
| | 4 | 89% |
| | 24 | 48% |
| ETD00382 | 0 | 100% |
| | 4 | 126% |
| | 24 | 64% |
| ETD00370 | 0 | 100% |
| | 4 | 97% |
| | 24 | 55% |
| ETD00374 | 0 | 100% |
| | 4 | 54% |
| | 24 | 2% |
| ETD00377 | 0 | 100% |
| | 4 | 92% |
| | 24 | 49% |
| ETD00378 | 0 | 100% |
| | 4 | 87% |
| | 24 | 55% |
| ETD00381 | 0 | 100% |
| | 4 | 54% |
| | 24 | 5% |

### Example 12. siRNA-Mediated Knockdown of ANGPTL7 Expression in Primary Human Trabecular Meshwork Cells in the Presence of Dexamethasone

[1252] In this experiment, primary human trabecular meshwork cells exposed to dexamethasone were treated with a siRNA targeting ANGPTL7. Primary HTM cells (Cell Applications Catalog #634-05a) were grown to confluency in high-glucose DMEM (Cytiva cat #SH30243.01) supplemented with 10% FBS (Gemini Bio Catalog #900-108) in a water-jacketed, humidified incubator at 37° C. in an atmosphere composed of air plus 5% carbon dioxide. The cells were harvested with Trypsin/EDTA (PromoCell Catalog #C-41010), resuspended in DMEM+10% FBS at a cell density of 200,000 cells/mL, then seeded in 24-well tissue culture plates at 20,000 cells/well. Once the cells reached 80% confluency, the media was replaced, and cells were serum starved in DMEM for 24 hrs in a water-jacketed, humidified incubator at 37° C. in an atmosphere composed of air plus 5% carbon dioxide. Next, 5 uL of dexamethasone (Sigma Catalog #D4902-100MG) prepared at 50 uM was added to the wells to give a final concentration of 500 nM and the plates incubated an additional 24 hours. This was designated Day 0. On Day 1, the media was replaced with 0.5 mL DMEM, 0.5 mL DMEM containing 1 uM negative control siRNA (Accell Non-targeting Control siRNA #2, Dharmacon Catalog #D-001910-02-20) or 0.5 mL DMEM containing 1 uM ETD00752 targeting ANGPTL7. The ANGPTL7 siRNA ETD00752 has a TEG-cholesterol moiety attached to the 3′ end of the sense strand and is derived from ETD00356. ETD00752 includes the following sequences: sense strand 5′ AfsusAfuGfuAfCfCfaAfgGfaUfgUfuAfsusu[Chol-TEG] 3′ (SEQ ID NO: 11377), antisense strand 5′ usAfsaCfaUfcCfuUfgguAfcAfuAfususu 3′ (SEQ ID NO: 11306). On Day 2, Day 4 and Day 6, 5 uL of 50 uM dexamethasone was added to all wells. On Day 3 and Day 5, media was replaced with 0.5 mL of fresh DMEM, 0.5 mL fresh DMEM containing 1 uM negative control siRNA (Accell Non-targeting Control siRNA #2, Dharmacon #D-001910-02-20) or 0.5 mL fresh DMEM containing 1 uM ETD00752 targeting ANGPTL7 in the appropriate wells. Controls also included cells that did not receive siRNA or dexamethsone.

[1253] On Day 8, media was collected for quantitation of ANGPTL7 protein by ELISA (RayBio® Human ANGPTL7 ELISA Kit Catalog #ELH-ANGPTL7-1) according to the manufacturer's instructions. Total RNA was harvested from the cells and cDNA prepared using TaqMan® Fast Advanced Cells-to-CT™ Kit (ThermoFisher, Catalog #A35374) according to the manufacturer's instructions. The level of ANGPTL7 mRNA from cells in each well was measured in triplicate by real-time qPCR on an Applied Biosystems 7500 Fast Real-Time PCR machine using TaqMan Gene Expression Assay for human ANGPTL7 (ThermoFisher, assay #Hs00221727_m1). The level of PPIA mRNA was measured using TaqMan Gene Expression Assay (ThermoFisher, assay#Hs99999904 ml) and used to determine relative ANGPTL7 mRNA levels from cells in each well using the delta-delta Ct method. All data were normalized to relative ANGPTL7 mRNA levels in cells treated with dexamethasone alone. Results are shown in Table 11. Results indicate primary HTM cells treated with dexamethasone have much higher levels of ANGPTL7 mRNA and ANGPTL7 protein than cells that have not been treated with dexamethasone. In addition, primary HTM cells exposed to dexamethasone and treated with ETD00752 had much lower levels of ANGPTL7 mRNA and ANGPTL7 protein than cells that had not been treated with ETD00752 or had been treated with the Accell Non-targeting Control siRNA #2.

TABLE 11
Induction of ANGPTL7 Expression by Dexamethasone and Knockdown
of ANGPTL7 expression by ETD00752 in Primary HTM Cells

| | Relative | ANGPTL7 |
|---|---|---|
| | ANGPTL7 | Protein |
| siRNA name | mRNA | (ng/uL) |
| Cells with dexamethasone | 1.00 | 15.7 |
| Accell Non-targeting Control siRNA #2 | 0.44 | 8.1 |
| ETD00752 | 0.021 | 1.6 |
| Cells without dexamethasone | 0.027 | 1.9 |

### Example 13. siRNA-Mediated Knockdown of ANGPTL7 Expression in a 3D In Vitro Model of Glaucoma

[1254] In the human eye, homeostatic intraocular pressure (IOP) is maintained by formation and drainage of the aqueous humor, primarily through the human trabecular meshwork (HTM). Approximately, 70-90% of the aqueous humor is drained through this tissue and it is believed that a decrease in outflow through the TM leads to elevated IOP. An in vitro 3D HTM model (3D-HTM™) that recapitulates the biological and physiological characteristics of the HTM has been established by the contract research organization Glauconix. The following study was performed using 3D-HTM™ in order to provide proof of concept of siRNA-mediated knockdown of ANGPTL7 in an in vitro model system of glaucoma.

[1255] The 3D-HTM™ constructs were cultured in 10% FBS-IMEM using primary donor trabecular meshwork cells over a two-week period. Once the 3D-HTM™ constructs were ready, they were placed in 6.7% FBS-IMEM for 24 h prior to the treatments. Treatments included the following: On Day 0, media was replaced with fresh 6.7% FBS medium containing 500 nM dexamethasone. On Day 3, the media was replaced with fresh 6.7% FBS medium containing 500 nM dexamethasone. On Day 4, the media was replaced with fresh 6.7% FBS medium without dexamethasone and transfected with siRNA. The siRNAs used in this study were ETD00153, ETD00353 and ETD00356. ETD00153 is an siRNA that does not target ANGPTL7 and functioned as a negative control siRNA. ETD00153 has the following sequences: sense strand 5′ UfsgsUfgGfcCfCfGfcAfcGfgGfgCfaAfsusu 3′ (SEQ ID NO: 11378), antisense strand 5′ usUfsgCfcCfcGfuGfcggGfcCfaCfasusu 3′ (SEQ ID NO: 11379). ETD00353 and ETD00356 are siRNAs that target ANGPTL7. ETD00353 has the following sequences: sense strand 5′ CfsasUfgGfaUfCfUfaCfcUfaCfuCfcAfsusu 3′ (SEQ ID NO: 11183), antisense strand 5′ usGfsgAfgUfaGfgUfagaUfcCfaUfgsusu 3′ (SEQ ID NO: 11303). ETD00356 has the following sequences: sense strand 5′ AfsusAfuGfuAfCfCfaAfgGfaUfgUfuAfsusu 3′ (SEQ ID NO:11186), antisense strand 5′ usAfsaCfaUfcCfuUfgguAfcAfuAfususu 3′ (SEQ ID NO: 11306). Transfection was accomplished using Targefect-RAW (Targeting Systems, Catalog #RAW-01). Transfection complexes were prepared on ice. First, 100 nM siRNA from 100 μM stock was added to 4.5 g/L DMEM without antibiotics and the tubes were flicked 12 times to accomplish mixing. Next, a volume of targetfect that was 1/50^{th} of the total volume of the mixture was added to the diluted siRNA and the tubes were flicked 12 times to accomplish mixing. To this a volume of the virofect enhancer reagent that was 1/25^{th} of the total volume of the mixture was added. The tubes were flicked 12 times to accomplish mixing. The mixture was then incubated at 37° C. for 25 minutes to allow the formation of the transfection complexes. Complete medium (10% pFBS DMEM with antibiotics) was then added to the transfection complexes at double the volume of the complex. For example, if the volume of the complexes was 0.5 mL, 1 mL of complete medium was added. Next, 225 μL of the complex plus complete medium mixture was added to the appropriate wells. On Day 5, dexamethasone was added to 500 nM without changing the media. On Day 6, the media was replaced with fresh media containing 6.7% FBS without dexamethasone and the wells receiving siRNA were transfected a second time using the protocol for the first transfection described above. On Day 7, dexamethasone was added to 500 nM without changing the media.

[1256] On Day 8, Total RNA was harvested from the cells using the RNAeasy Plus Mini kit (Qiagen, Catalog #74134) according to the manufacturer's instructions. The cDNA was prepared from 500 ng of total RNA using the Maxima first strand synthesis kit (ThermoFisher Catalog #K1642) according to the manufacturer's instructions. The level of ANGPTL7 mRNA from cells in each well was measured in triplicate by real-time qPCR on an Applied Biosystems 7500 Fast Real-Time PCR machine using TaqMan Gene Expression Assay for human ANGPTL7 (ThermoFisher, assay#Hs00221727 ml). The level of PPIA mRNA was measured using TaqMan Gene Expression Assay (ThermoFisher, assay #Hs99999904 ml) and used to determine relative ANGPTL7 mRNA levels from cells in each well using the delta-delta Ct method. All data were normalized to relative ANGPTL7 mRNA levels in cells treated with dexamethasone alone. Results are shown in Table 12. Results indicate 3D-HTM™ cells exposed to dexamethasone and transfected with siRNAs ETD00353 or ETD00356 had much lower levels of ANGPTL7 mRNA than 3D-HTM™ cells not receiving siRNA or those that had been transfected with the negative control siRNA ETD00153.

TABLE 12
siRNA-mediated Knockdown of ANGPTL7
expression in 3D-HTMTM cells

| siRNA name | Relative ANGPTL7 mRNA |
|---|---|
| 3D-HTM ™ cells with dexamethasone | 1.00 |
| ETD00153 | 0.95 |
| ETD00353 | 0.54 |
| ETD00356 | 0.31 |

### Example 14. Additional ANGPTL7 siRNAs for Activity in Human Cells in Culture

[1257] Chemically modified ANGPTL7 siRNAs cross reactive for human and non-human primate were assayed for ANGPTL7 mRNA knockdown activity in cells in culture. ARPE-19 (ATCC® CRL-2302™) cells were seeded in 96-well tissue culture plates at a cell density of 7,500 cells per well in DMEM:F12 (ATCC Catalog No. 30-2006) supplemented with 10% fetal bovine serum and incubated overnight in a water-jacketed, humidified incubator at 37° C. in an atmosphere composed of air plus 5% carbon dioxide. The ANGPTL7 siRNAs were individually transfected into ARPE-19 cells in duplicate wells at 1 nM or 10 nM final concentration using 0.3 μL Lipofectamine RNAiMax (Fisher) per well. Silencer Select Negative Control #1 (ThermoFisher, Catalog #4390843) was transfected at 10 nM final concentration as a control. After incubation for 48 hours at 37° C., total RNA was harvested from each well and cDNA prepared using TaqMan® Fast Advanced Cells-to-CT™ Kit (ThermoFisher, Catalog #A35374) according to the manufacturer's instructions. The level of ANGPTL7 mRNA from each well was measured in triplicate by real-time qPCR on an Applied Biosystems 7500 Fast Real-Time PCR machine using TaqMan® Gene Expression Assay for human ANGPTL7 (ThermoFisher, assay #Hs00221727_m1). The level of PPIA mRNA was measured using TaqMan® Gene Expression Assay (ThermoFisher, assay #Hs99999904_m1) and used to determine relative ANGPTL7 mRNA levels in each well using the delta-delta Ct method. All data were normalized to relative ANGPTL7 mRNA levels in untreated ARPE-19 cells. Sequences of the modified ANGPTL7 siRNAs are shown in Table 13, and results are shown in Table 14.

TABLE 13
Sequences of chemically modified ANGPTL7-specific siRNAs

| siRNA name | Sense strand (5′ to 3′) | Antisense strand (5′ to 3′) |
|---|---|---|
| ETD00936 | asasaaCfaAfCfAfaaguggcgagsusu | csUfscgcCfacuuuguUfgUfuuususu |
| | (SEQ ID NO: 11402) | (SEQ ID NO: 11422) |
| ETD00937 | CsuscaCfcCfAfAfacccacaaaasusu | usUfsuugUfggguuugGfgUfgagsusu |
| | (SEQ ID NO: 11403) | (SEQ ID NO: 11423) |
| ETD00938 | gsusauAfaGfCfUfuccuccugaususu | asUfscagGfaggaagcUfuAfuacsusu |
| | (SEQ ID NO: 11404) | (SEQ ID NO: 11424) |
| ETD00939 | csusgaGfuAfUfAfgccacuuugususu | asCfsaaaGfuggcuauAfcUfcagsusu |
| | (SEQ ID NO: 11405) | (SEQ ID NO: 11425) |
| ETD00940 | ususggGfcAfAfUfgaacucaacasusu | usGfsuugAfguucauuGfcCfcaasusu |
| | (SEQ ID NO: 11406) | (SEQ ID NO: 11426) |
| ETD00941 | csasuaAfcAfAfCfacagccuucasusu | usGfsaagGfcuguguuGfuUfaugsusu |
| | (SEQ ID NO: 11407) | (SEQ ID NO: 11427) |
| ETD00942 | usasugUfaCfCfAfaggauguuacsusu | gsUfsaacAfuccuuggUfaCfauasusu |
| | (SEQ ID NO: 11408) | (SEQ ID NO: 11428) |
| ETD00943 | usasccAfaGfGfAfuguuacaguasusu | usAfscugUfaacauccUfuGfguasusu |
| | (SEQ ID NO: 11409) | (SEQ ID NO: 11429) |
| ETD00944 | gsasugUfuAfCfAfguaaacaggasusu | usCfscugUfuuacuguAfaCfaucsusu |
| | (SEQ ID NO: 11410) | (SEQ ID NO: 11430) |
| ETD00945 | usgsuuAfcAfGfUfaaacaggaugsusu | csAfsuccUfguuuacuGfuAfacasusu |
| | (SEQ ID NO: 11411) | (SEQ ID NO: 11431) |
| ETD00946 | usgscuAfaAfAfAfgaaccauauususu | asAfsuauGfguucuuuUfuAfgcasusu |
| | (SEQ ID NO: 11412) | (SEQ ID NO: 11432) |
| ETD00947 | gsgsccUfuUfGfAfguguuagagasusu | usCfsucuAfacacucaAfaGfgccsusu |
| | (SEQ ID NO: 11413) | (SEQ ID NO: 11433) |
| ETD00948 | gsgscaCfaAfAfAfcugccuuaaasusu | usUfsuaaGfgcaguuuUfgUfgccsusu |
| | (SEQ ID NO: 11414) | (SEQ ID NO: 11434) |
| ETD00949 | gsusaaGfaAfAfCfaagcucaaggsusu | csCfsuugAfgcuuguuUfcUfuacsusu |
| | (SEQ ID NO: 11415) | (SEQ ID NO: 11435) |
| ETD00950 | asasaaCfuGfAfAfgguagauggususu | asCfscauCfuaccuucAfgUfuuususu |
| | (SEQ ID NO: 11416) | (SEQ ID NO: 11436) |
| ETD00951 | asascuGfaAfGfGfuagauggugususu | asCfsaccAfucuaccuUfcAfguususu |
| | (SEQ ID NO: 11417) | (SEQ ID NO: 11437) |
| ETD00952 | asusggUfgUfUfAfuaguuaauaasusu | usUfsauuAfacuauaaCfaCfcaususu |
| | (SEQ ID NO: 11418) | (SEQ ID NO: 11438) |
| ETD00953 | ususucCfuUfCfUfacaauaaacasusu | usGfsuuuAfuuguagaAfgGfaaasusu |
| | (SEQ ID NO: 11419) | (SEQ ID NO: 11439) |
| ETD00954 | csasauGfaAfCfUfcaacagcuaususu | asUfsagcUfguugaguUfcAfuugsusu |
| | (SEQ ID NO: 11420) | (SEQ ID NO: 11440) |
| ETD00955 | usgsaaAfuUfAfUfcuugagucuasusu | usAfsgacUfcaagauaAfuUfucasusu |
| | (SEQ ID NO: 11421) | (SEQ ID NO: 11441) |

where “Nf” is a 2′-fluoro-modified nucleoside, “n” is a 2′-O-methyl modified nucleoside, “s” is a phosphorothioate linkage, and N comprises a nucleoside.

TABLE 14
Knockdown Activity of ANGPLT7-Specific siRNAs
at 1 nM and 10 nM in Human ARPE-19 cells

| | Sense | Antisense | Relative ANGPTL7 mRNA | |
|---|---|---|---|---|
| | Strand | Strand | Level | |
| | (SEQ ID | (SEQ ID | 1 nM | 10 nM |
| siRNA name | NO) | NO) | siRNA | siRNA |
| Untreated Cells | — | — | 1.00 | 1.00 |
| Negative Control | — | — | 0.69 | 1.50 |
| siRNA | | | | |
| ETD00936 | 11402 | 11422 | 1.54 | 1.40 |
| ETD00937 | 11403 | 11423 | 1.01 | 0.47 |
| ETD00938 | 11404 | 11424 | 0.83 | 0.45 |
| ETD00939 | 11405 | 11425 | 0.75 | 0.29 |
| ETD00940 | 11406 | 11426 | 1.07 | 0.86 |
| ETD00941 | 11407 | 11427 | 1.12 | 0.57 |
| ETD00942 | 11408 | 11428 | 0.59 | 0.12 |
| ETD00943 | 11409 | 11429 | 0.22 | 0.07 |
| ETD00944 | 11410 | 11430 | 0.83 | 0.31 |
| ETD00945 | 11411 | 11431 | 0.96 | 0.44 |
| ETD00946 | 11412 | 11432 | 0.33 | 0.50 |
| ETD00947 | 11413 | 11433 | 0.55 | 0.23 |
| ETD00948 | 11414 | 11434 | 0.41 | 0.20 |
| ETD00949 | 11415 | 11435 | 1.35 | 1.02 |
| ETD00950 | 11416 | 11436 | 0.61 | 0.20 |
| ETD00951 | 11417 | 11437 | 0.31 | 0.10 |
| ETD00952 | 11418 | 11438 | 0.19 | 0.29 |
| ETD00953 | 11419 | 11439 | 0.52 | 0.62 |
| ETD00954 | 11420 | 11440 | 0.19 | 0.09 |
| ETD00955 | 11421 | 11441 | 0.23 | 0.21 |

“—” untreated ARPE-19 cells; Negative Control siRNA, Silencer Select Negative Control #1

### Example 15. Determining the IC50 of Additional ANGPTL7 siRNAs in Human ARPE-19 Cells

[1258] The IC50 values for knockdown of ANGPTL7 mRNA by select ANGPTL7 siRNAs were determined in ARPE-19 cells. The ETD00942, ETD00943, ETD00951, ETD00952, ETD00954 and ETD00955 siRNAs were assayed individually at 3 nM, 1 nM, 0.3 nM, 0.1 nM and 0.03 nM. A subset of siRNAs was also assayed at 0.01 nM. The ARPE-19 (ATCC® CRL-2302™) cells were seeded in 96-well tissue culture plates at a cell density of 7,500 cells per well in DMEM supplemented with 10% fetal bovine serum and incubated overnight in a water-jacketed, humidified incubator at 37° C. in an atmosphere composed of air plus 5% carbon dioxide. The ANGPTL7 siRNAs were individually transfected into ARPE-19 cells in triplicate wells using 0.3 μL Lipofectamine RNAiMax (Fisher) per well. Silencer Select Negative Control #1 (ThermoFisher, Catalog #4390843) was transfected at 0.03 and 3 nM final concentration as a control. After incubation for 48 hours at 37° C., total RNA was harvested from each well and cDNA prepared using TaqMan® Fast Advanced Cells-to-CT™ Kit (ThermoFisher, Catalog #A35374) according to the manufacturer's instructions. The level of ANGPTL7 mRNA from each well was measured in triplicate by real-time qPCR on an Applied Biosystems 7500 Fast Real-Time PCR machine using TaqMan® Gene Expression Assay for human ANGPTL7 (ThermoFisher, assay #Hs00221727_m1). The level of PPIA mRNA was measured using TaqMan® Gene Expression Assay (ThermoFisher, assay #Hs99999904_m1) and used to determine relative ANGPTL7 mRNA levels in each well using the delta-delta Ct method. All data were normalized to relative ANGPTL7 mRNA levels in untreated ARPE-19 cells. Curve fit was accomplished using the [inhibitor] vs. response (three parameters) function in GraphPad Prism software. Results are shown in Table 15.

TABLE 15
IC50 Values of ETD00942, ETD00943, ETD00951,
ETD00952, ETD00954 and ETD00955 ANGPTL7
siRNAs in Human ARPE-19 Cells

| | | | Relative ANGPTL7 | |
|---|---|---|---|---|
| siRNA | [siRNA] | | mRNA Level | IC50 |
| — | — | | 1.000 | ND |
| Negative Control siRNA | 1 | nM | 1.42 | ND |
| ETD00942 | 30 | nM | 0.12 | 0.16 |
| | 10 | nM | 0.27 | |
| | 3 | nM | 0.46 | |
| | 1 | nM | 0.71 | |
| | 0.3 | nM | 0.82 | |
| | 0.1 | nM | 1.50 | |
| | 0.03 | nM | 1.95 | |
| ETD00943 | 30 | nM | 0.10 | 0.25 |
| | 10 | nM | 0.24 | |
| | 3 | nM | 0.36 | |
| | 1 | nM | 0.71 | |
| | 0.3 | nM | 0.88 | |
| | 0.1 | nM | 1.36 | |
| | 0.03 | nM | 1.76 | |
| ETD00951 | 30 | nM | 0.09 | 0.29 |
| | 10 | nM | 0.17 | |
| | 3 | nM | 0.24 | |
| | 1 | nM | 0.58 | |
| | 0.3 | nM | 0.98 | |
| | 0.1 | nM | 1.36 | |
| | 0.03 | nM | 1.77 | |
| ETD00952 | 30 | nM | 0.37 | 0.08 |
| | 10 | nM | 0.34 | |
| | 3 | nM | 0.30 | |
| | 1 | nM | 0.43 | |
| | 0.3 | nM | 0.64 | |
| | 0.1 | nM | 1.10 | |
| | 0.03 | nM | 1.57 | |
| ETD00954 | 30 | nM | 0.16 | 0.24 |
| | 10 | nM | 0.31 | |
| | 3 | nM | 0.39 | |
| | 1 | nM | 1.00 | |
| | 0.3 | nM | 1.58 | |
| | 0.1 | nM | 2.30 | |
| | 0.03 | nM | 3.09 | |
| ETD00955 | 30 | nM | 0.34 | 0.24 |
| | 10 | nM | 0.53 | |
| | 3 | nM | 0.76 | |
| | 1 | nM | 1.33 | |
| | 0.3 | nM | 1.77 | |
| | 0.1 | nM | 2.65 | |
| | 0.03 | nM | 3.39 | |

“—” untreated ARPE-19 cells; Negative Control siRNA, Silencer Select Negative Control #1

### Example 16. Assessing the Extent of Nuclease Resistance of Additional ANGPTL7 siRNAs

[1259] Resistance of select ANGPTL7 siRNAs to nuclease digestion was assessed by incubating the siRNAs in rat liver tritosomes. Each siRNA (7 ng/μL final concentration) was placed into a PCR tube containing a cocktail prepared on ice containing 1× catabolic buffer (Xenotech, Catalog #K5200, Lot #18-1-0698), 0.5× rat tritosomes (Xenotech, Catalog #R0610.LT, Lot #1610405), 0.1 U/μL porcine intestinal heparin (Zageno, Catalog #H3149-10KU). An aliquot was removed, an equal volume of 50 mM EDTA was added, and the sample placed at −80° C. This sample was designated as the 0 hr timepoint. The remainder of the reaction was placed in an Eppendorf Mastercycler Gradient and incubated at 37° C. After incubation for 4 and 24 hours, an aliquot was removed from the reaction and stopped by addition of an equal volume of 50 mM EDTA and placed at −80° C. until analysis by gel electrophoresis. All samples were then thawed on ice and 6×DNA Gel Loading Dye (ThermoFisher Catalog #R0611) was added to 1× final concentration. 20 μL of each sample was loaded onto a 20% polyacrylamide TBE gel (ThermoFisher, Catalog #EC63155BOX).

[1260] Electrophoresis was carried out at a constant 100V for 75 minutes in an XCell SureLock Mini-Cell Electrophoresis System (ThermoFisher) using 1×TBE (Tris/boric/EDTA) (Fisher, Catalog #FERB52) as the tank buffer. The siRNA was visualized by staining the gel with a 1:10,000 dilution of SYBR Gold (ThermoFisher, Catalog #S-11494) in TBE for 15 minutes at room temperature with rocking. The gel was washed with 1×TBE for 15 minutes and then placed on a FotoPrepl UV transilluminator (Fotodyne). The gel was imaged using the camera app set on MONO on an iPhone 6s with a yellow gel filter (Neewer) placed over the lens. Band intensity was measured using NIH ImageJ using the “Analyze: Gels” function. The remaining siRNA percent was normalized to the value obtained at the 0 hr timepoint for that siRNA. Results are shown in Table 16. By using this assay, it was determined that some siRNAs are more resistant to nuclease digestion with more remaining intact over time compared with other siRNAs with the same modification pattern.

TABLE 16
Resistance of ANGPTL7 siRNAs to Nucleases
Present in Rat Liver Tritosomes

| siRNA | Timepoint (hr) | % remaining |
|---|---|---|
| ETD00942 | 0 | 100% |
| | 4 | 24% |
| | 24 | 9% |
| ETD00943 | 0 | 100% |
| | 4 | 77% |
| | 24 | 19% |
| ETD00951 | 0 | 100% |
| | 4 | 75% |
| | 24 | 52% |
| ETD00952 | 0 | 100% |
| | 4 | 85% |
| | 24 | 13% |
| ETD00954 | 0 | 100% |
| | 4 | 57% |
| | 24 | 34% |
| ETD00955 | 0 | 100% |
| | 4 | 52% |
| | 24 | 28% |
| ETD00356 | 0 | 100% |
| | 4 | 57% |
| | 24 | 38% |

### Example 17. siRNA-Mediated Knockdown of ANGPTL7 Expression in Primary Human Trabecular Meshwork Cells in the Presence of Dexamethasone

[1261] In this experiment, primary human trabecular meshwork cells exposed to dexamethasone were treated with a siRNA targeting ANGPTL7. Primary HTM cells (Cell Applications Catalog #634-05a) were grown to confluency in high-glucose DMEM (Cytiva cat #SH30243.01) supplemented with 10% FBS (Gemini Bio Catalog #900-108) in a water-jacketed, humidified incubator at 37° C. in an atmosphere composed of air plus 5% carbon dioxide. The cells were harvested with Trypsin/EDTA (PromoCell Catalog #C-41010), resuspended in DMEM+10% FBS at a cell density of 200,000 cells/mL, then seeded in 24-well tissue culture plates at 20,000 cells/well. Once the cells reached 80% confluency, the media was replaced, and cells were serum starved in DMEM for 24 hrs in a water-jacketed, humidified incubator at 37° C. in an atmosphere composed of air plus 5% carbon dioxide. Next, 5 μL of dexamethasone (Sigma Catalog #D4902-100MG) prepared at 50 μM was added to the wells to give a final concentration of 500 nM and the plates incubated an additional 24 hours. This was designated Day 0. On Day 1, the media was replaced with 0.5 mL DMEM, 0.5 mL DMEM containing 1 μM ETD01040, ETD01041, ETD01042 or ETD01043 targeting ANGPTL7. The ANGPTL7 siRNAs have a TEG-cholesterol moiety attached to the 3′ end of their sense strands and are derived from ETD00370, ETD00377, ETD00378 and ETD00381, respectively. ETD01040 includes the following sequences: sense strand 5′-AfsgsCfaGfuAfGfCfuUfgUfcUfuUfuAfsusu-[Chol-TEG]-3′ (SEQ ID NO: 11442), antisense strand 5′-usAfsaAfaGfaCfaAfgcuAfcUfgCfususu-3′ (SEQ ID NO: 11446). ETD01041 includes the following sequences: sense strand 5′-AfscsAfcAfaAfAfAfuUfgUfuCfgGfcAfsusu-[Chol-TEG]-3′ (SEQ ID NO: 11443), antisense strand 5′-usGfscCfgAfaCfaAfuuuUfuGfuGfususu-3′ (SEQ ID NO: 11447). ETD01042 includes the following sequences: sense strand 5′-CfsasCfaAfaAfAfUfuGfuUfcGfgCfuAfsusu-[Chol-TEG]-3′ (SEQ ID NO: 11444), antisense strand 5′-usAfsgCfcGfaAfcAfauuUfuUfgUfgsusu-3′ (SEQ ID NO: 11448). ETD01043 includes the following sequences: sense strand 5′-GfsasAfgGfuAfGfAfuGfgUfgUfuAfuAfsusu-[Chol-TEG]-3′ (SEQ ID NO: 11445), antisense strand 5′-usAfsuAfaCfaCfcAfucuAfcCfuUfcsusu-3′ (SEQ ID NO: 11449).

[1262] On Day 2, Day 4, and Day 6, 5 μL of 50 μM dexamethasone was added to all wells. On Day 3 and Day 5, media was replaced with 0.5 mL of fresh DMEM or 0.5 mL fresh DMEM containing 1 μM ETD01040, ETD01041, ETD01042, or ETD01043 targeting ANGPTL7 in the appropriate wells. Controls also included cells that did not receive siRNA or dexamethsone.

[1263] On Day 8, total RNA was harvested from the cells and cDNA prepared using TaqMan® Fast Advanced Cells-to-CT™ Kit (ThermoFisher, Catalog #A35374) according to the manufacturer's instructions. The level of ANGPTL7 mRNA from cells in each well was measured in triplicate by real-time qPCR on an Applied Biosystems 7500 Fast Real-Time PCR machine using TaqMan Gene Expression Assay for human ANGPTL7 (ThermoFisher, assay #Hs00221727_m1). The level of PPIA mRNA was measured using TaqMan Gene Expression Assay (ThermoFisher, assay#Hs99999904_m1) and used to determine relative ANGPTL7 mRNA levels from cells in each well using the delta-delta Ct method. All data were normalized to relative ANGPTL7 mRNA levels in cells treated with dexamethasone alone. Results are shown in Table 17. Results indicate primary HTM cells treated with dexamethasone have much higher levels of ANGPTL7 mRNA than cells that have not been treated with dexamethasone. In addition, primary HTM cells exposed to dexamethasone and treated with ETD01040, ETD01041, ETD01042, or ETD01043 had much lower levels of ANGPTL7 mRNA than cells that had not been treated with siRNA.

TABLE 17
Induction of ANGPTL7 Expression by Dexamethasone and
Knockdown of ANGPTL7 expression by ETD01040, ETD01041,
ETD01042 and ETD01043 in Primary HTM Cells

| | Relative ANGPTL7 |
|---|---|
| siRNA name | mRNA Level |
| Cells treated with dexamethasone | 1.00 |
| Untreated cells | 0.20 |
| ETD01040 | 0.01 |
| ETD01041 | 0.05 |
| ETD01042 | 0.05 |
| ETD01043 | 0.03 |

### Example 18. siRNA-Mediated Knockdown of ANGPTL7 Expression in a 3D In Vitro Model of Glaucoma

[1264] In the human eye, homeostatic intraocular pressure (IOP) is maintained by formation and drainage of the aqueous humor, primarily through the human trabecular meshwork (HTM). Approximately, 70-90% of the aqueous humor is drained through this tissue and it is believed that a decrease in outflow through the HTM leads to elevated IOP. An in vitro 3D HTM model (3D-HTM™) that recapitulates the biological and physiological characteristics of the HTM has been established by the contract research organization Glauconix. The following study was performed using 3D-HTM™ in order to provide proof of concept that siRNA-mediated knockdown of ANGPTL7 in an in vitro model system of glaucoma can increase outflow through the HTM. Separate 3D-HTM™ constructs containing primary trabecular cells from four separate donors were cultured in 10% FBS-IMEM over a two-week period. Once the 3D-HTM™ constructs were ready, they were placed in 6.7% FBS-IMEM for 24 h prior to the treatments. Treatments included the following: On Day 0, media was replaced with fresh 6.7% FBS medium containing 500 nM dexamethasone. On Day 3, the media was replaced with fresh 6.7% FBS medium in the control wells or 6.7% FBS medium containing 500 nM dexamethasone. On Day 4, the media was replaced with fresh 6.7% FBS medium without dexamethasone and transfected with siRNA. The siRNAs used in this study were ETD00153 and ETD00356. ETD00153 is an siRNA that does not target ANGPTL7 and functioned as a negative control siRNA. ETD00153 has the following sequences: sense strand 5′ UfsgsUfgGfcCfCfGfcAfcGfgGfgCfaAfsusu 3′ (SEQ ID NO: 11378), antisense strand 5′ usUfsgCfcCfcGfuGfcggGfcCfaCfasusu 3′ (SEQ ID NO: 11379). ETD00356 is an siRNA that targets ANGPTL7. ETD00356 has the following sequences: sense strand 5′ AfsusAfuGfuAfCfCfaAfgGfaUfgUfuAfsusu 3′ (SEQ ID NO: 11186), antisense strand 5′ usAfsaCfaUfcCfuUfgguAfcAfuAfususu 3′ (SEQ ID NO: 11306). Transfection was accomplished using Targefect-RAW (Targeting Systems, Catalog #RAW-01). Transfection complexes were prepared on ice. First, 100 nM siRNA from 100 μM stock was added to 4.5 g/L DMEM without antibiotics and the tubes were flicked 12 times to accomplish mixing. Next, a volume of Targefect that was 1/50^{th} of the total volume of the mixture was added to the diluted siRNA and the tubes were flicked 12 times to accomplish mixing. To this, a volume of the virofect enhancer reagent that was 1/25^{th} of the total volume of the mixture was added. The tubes were flicked 12 times to accomplish mixing. The mixture was then incubated at 37° C. for 25 minutes to allow the formation of the transfection complexes. Complete medium (10% pFBS DMEM with antibiotics) was then added to the transfection complexes at double the volume of the complex. For example, if the volume of the complexes was 0.5 mL, 1 mL of complete medium was added. Next, 225 μL of the complex plus complete medium mixture was added to the appropriate wells. On Day 5, dexamethasone was added to 500 nM without changing the media only in the wells containing the tissue constructs undergoing dexamethasone treatment. On Day 6, the media in all wells was replaced with fresh media containing 6.7% FBS without dexamethasone and the wells receiving siRNA were transfected a second time using the protocol for the first transfection described above. On Day 7, dexamethasone was added to 500 nM without changing the media only in the wells containing the tissue constructs undergoing dexamethasone treatment. All treatments were performed on tissue constructs in parallel wells. One set of wells was used to measure mRNA and protein and the other set for perfusion studies to measure outflow.

[1265] On Day 8, media was collected for quantitation of ANGPTL7 protein by ELISA (RayBio® Human ANGPTL7 ELISA Kit Catalog #ELH-ANGPTL7-1) according to the manufacturer's instructions. Total RNA was harvested from the cells using the RNAeasy Plus Mini kit (Qiagen, Catalog #74134) according to the manufacturer's instructions. The cDNA was prepared from 500 ng of total RNA using the Maxima first strand synthesis kit (ThermoFisher Catalog#K1642) according to the manufacturer's instructions. The level of ANGPTL7 mRNA from cells in each well was measured in triplicate by real-time qPCR on an Applied Biosystems 7500 Fast Real-Time PCR machine using TaqMan Gene Expression Assay for human ANGPTL7 (ThermoFisher, assay #Hs00221727_m1). The level of PPIA mRNA was measured using TaqMan Gene Expression Assay (ThermoFisher, assay #Hs99999904_m1) and used to determine relative ANGPTL7 mRNA levels from cells in each well using the delta-delta Ct method. All data were normalized to relative ANGPTL7 mRNA levels in cells treated with dexamethasone alone. The mean values of the four donors are shown in Table 18. Results indicate that on Day 8, 3D-HTM™ cells exposed to dexamethasone and transfected with ETD00356 had much lower levels of ANGPTL7 mRNA and ANGPTL7 protein than 3D-HTM™ cells exposed to dexamethasone and not receiving siRNA or those that had been transfected with the negative control siRNA ETD00153.

[1266] In the parallel set of wells, the tissue constructs were perfused to determine outflow. Briefly, the constructs were securely placed in the perfusion chamber and then perfused at various rates for 5 hours per flow rate (2, 4, 8, and 16 μl/min) with medium. Samples were perfused in an apical-to-basal direction, with perfusion medium consisting of Dulbecco's modified Eagle's medium (DMEM) with 0.1% gentamicin. The temperature was maintained at 34° C. Pressure was continuously monitored and recorded. Additionally, the “outflow facility” was calculated mathematically after the treatments. The mean values of the four donors are shown in Table 18. Results indicate that on Day 8, 3D-HTM™ cells exposed to dexamethasone and transfected with ETD00356 had much greater outflow facility than 3D-HTM™ cells exposed to dexamethasone and not receiving siRNA or those that had been transfected with the negative control siRNA ETD00153.

TABLE 18
siRNA-mediated Knockdown of ANGPTL7 expression
in 3D-HTM ™ cells

| | | | Outflow |
|---|---|---|---|
| | Relative | ANGPTL7 | facility |
| | ANGPTL7 | protein | (μL/min/ |
| Treatment | mRNA Level | (ng/mL) | mm2/mmHg) |
| 3D-HTM ™ cells with | 16.06 | 56.75 | 0.32 |
| dexamethasone | | | |
| Untreated 3D-HTM ™ | 1.00 | ND | 0.57 |
| cells | | | |
| ETD00153 | 10.74 | 46.12 | 0.27 |
| ETD00356 | 2.59 | 11.83 | 0.54 |

### Example 19. Additional siRNA-Mediated Knockdown of ANGPTL7 Expression in a 3D In Vitro Model of Glaucoma

[1267] In the human eye, homeostatic intraocular pressure (IOP) is maintained by formation and drainage of the aqueous humor, primarily through the human trabecular meshwork (HTM). Approximately, 70-90% of the aqueous humor is drained through this tissue and it is believed that a decrease in outflow through the HTM leads to elevated IOP. An in vitro 3D HTM model (3D-HTM™) that recapitulates the biological and physiological characteristics of the HTM has been established by the contract research organization Glauconix. The following study is performed using 3D-HTM™ in order to provide proof of concept that siRNA-mediated knockdown of ANGPTL7 in an in vitro model system of glaucoma can increase outflow through the HTM. Separate 3D-HTM™ constructs containing primary trabecular cells from four separate donors are cultured in 10% FBS-IMEM over a two-week period. Once the 3D-HTM™ constructs are ready, they are placed in 0.5% FBS-IMEM for 24 hours prior to the treatments. Treatments include the following: On Day 0, media is replaced with fresh 0.5% FBS medium containing 500 nM dexamethasone in 0.5% FBS medium. On Day 3, the media is replaced with fresh 0.5% FBS medium in the control wells or 0.5% FBS medium containing 500 nM dexamethasone. On Day 4, the media is replaced with fresh 0.5% FBS medium without dexamethasone and siRNA is applied.

[1268] The siRNAs used in this study are ETD01053 and ETD00752. ETD01053 is an siRNA that does not target ANGPTL7 and functions as a negative control siRNA. ETD01053 has the following sequences: sense strand 5′-csusuaCfgCfUfGfaguacuucgasusu[Chol-TEG]-3′ (SEQ ID NO: 11523), antisense strand 5′-usCfsgaaGfuacucagCfgUfaagsusu-3′ (SEQ ID NO: 11527). ETD00752 is an siRNA that targets ANGPTL7. ETD00752 includes the following sequences: sense strand 5′-AfsusAfuGfuAfCfCfaAfgGfaUfgUfuAfsusu[Chol-TEG]-3′ (SEQ ID NO: 11377), antisense strand 5′-usAfsaCfaUfcCfuUfgguAfcAfuAfususu-3′ (SEQ ID NO: 11306). Transfection is accomplished without the use of a transfection reagent. Specifically, 16 μl of 100 μM stock siRNA to 1584 μl of fresh media containing 0.5% FBS. Next, 500 μL of the siRNA+medium mixture is added to appropriate wells. On Day 5, dexamethasone is added to 500 nM without changing the media only in the wells containing the tissue constructs undergoing dexamethasone treatment. On Day 6, the media in all wells is replaced with fresh media containing 0.5% FBS without dexamethasone and the wells receiving siRNA are transfected a second time using the protocol for the first transfection described above. On Day 7, dexamethasone is added to 500 nM without changing the media only in the wells containing the tissue constructs undergoing dexamethasone treatment. On Day 8, the media in all wells is replaced with fresh media containing 0.5% FBS without dexamethasone and the wells receiving siRNA are transfected a third time using the protocol for the first transfection described above. Cells are harvested on Day 10. All treatments are performed on tissue constructs in parallel wells. One set of wells is used to measure mRNA and protein and the other set is used for perfusion studies to measure outflow facility.

[1269] On Days 3 and 10, media is collected for quantitation of ANGPTL7 protein by ELISA (RayBio® Human ANGPTL7 ELISA Kit, Catalog #ELH-ANGPTL7-1) according to the manufacturer's instructions. Total RNA is harvested from the cells using the RNeasy® Plus Mini kit (Qiagen, Catalog #74134) according to the manufacturer's instructions. The cDNA is prepared from 500 ng of total RNA using the Maxima® First Strand cDNA synthesis kit (ThermoFisher, Catalog#K1642) according to the manufacturer's instructions. The level of ANGPTL7 mRNA from cells in each well is measured in triplicate by real-time qPCR on an Applied Biosystems™ 7500 Fast Real-Time PCR machine using TaqMan Gene Expression Assay for human ANGPTL7 (ThermoFisher, assay #Hs00221727_m1). The level of PPIA mRNA is measured using TaqMan® Gene Expression Assay (ThermoFisher, assay #Hs99999904_m1) and used to determine relative ANGPTL7 mRNA levels from cells in each well using the delta-delta Ct method. All data are normalized to relative ANGPTL7 mRNA levels in cells treated with dexamethasone alone.

[1270] In the parallel set of wells, the tissue constructs are perfused to determine outflow. Briefly, the constructs are securely placed in the perfusion chamber and then perfused at various rates for 5 hours per flow rate (2, 4, 8, and 16 μl/min) with medium. Samples are perfused in an apical-to-basal direction, with perfusion medium consisting of Dulbecco's modified Eagle's medium (DMEM) with 0.1% gentamicin. The temperature is maintained at 34° C. Pressure is continuously monitored and recorded. Additionally, the “outflow facility” is calculated mathematically after the treatments.

### Example 20. siRNA-Mediated Modulation of ANGPTL7 and Effects on Intraocular Pressure in Non-Human Primates

[1271] In this experiment, non-human primates are used to evaluate the effect of siRNA inhibition of ANGPTL7 in the eye.

[1272] Cynomolgus monkeys are divided into 4 groups. All treatments are applied to both eyes via intravitreal injection (IVT). Group A (n=4) is treated with vehicle, and Groups B, C, and D (n=4 per group) are treated with ANGPTL7 targeting siRNAs.

[1273] The ANGPTL7 siRNA has the following sequence: sense strand 5′ GUACAACUGCUGCACAGACUU 3′ (SEQ ID NO:11089), antisense strand 5′ GUCUGUGCAGCAGUUGUACUU 3′ (SEQ ID NO: 11090). Some preferred siRNA sequences may include any one of ETD00342 (sense strand 5′ CfsasAfaGfgUfGfGfcUfaCfuGfgUfaAfsusu 3′ (SEQ ID NO: 11172), antisense strand 5′ usUfsaCfcAfgUfaGfccaCfcUfuUfgsusu 3′ (SEQ ID NO: 11292)), ETD00343 (sense strand 5′ AfsasGfgUfgGfCfUfaCfuGfgUfaCfaAfsusu 3′ (SEQ ID NO: 11173), antisense strand 5′ usUfsgUfaCfcAfgUfagcCfaCfcUfususu 3′ (SEQ ID NO: 11293)), ETD00344 (sense strand 5′ GfsusGfgCfuAfCfUfgGfuAfcAfaCfuAfsusu 3′ (SEQ ID NO: 11174), antisense strand 5′ usAfsgUfuGfuAfcCfaguAfgCfcAfcsusu 3′ (SEQ ID NO: 11294)), ETD00345 (sense strand 5′ UfsgsGfuAfcAfAfCfuGfcUfgCfaCfaAfsusu 3′ (SEQ ID NO: 11175), antisense strand 5′ usUfsgUfgCfaGfcAfguuGfuAfcCfasusu 3′ (SEQ ID NO: 11295)), ETD00346 (sense strand 5′ GfsusAfcAfaCfUfGfcUfgCfaCfaGfaAfsusu 3′ (SEQ ID NO: 11176), antisense strand 5′ usUfscUfgUfgCfaGfcagUfuGfuAfcsusu 3′ (SEQ ID NO: 11296)), ETD00752 (sense strand 5′ AfsusAfuGfuAfCfCfaAfgGfaUfgUfuAfsusu[Chol-TEG] 3′ (SEQ ID NO: 11377), antisense strand 5′ usAfsaCfaUfcCfuUfgguAfcAfuAfususu 3′ (SEQ ID NO: 11306), ETD01040 (sense strand 5′-AfsgsCfaGfuAfGfCfuUfgUfcUfuUfuAfsusu-[Chol-TEG]-3′ (SEQ ID NO: 11442), antisense strand 5′-usAfsaAfaGfaCfaAfgcuAfcUfgCfususu-3′ (SEQ ID NO: 11446)), ETD01043 (sense strand 5′-GfsasAfgGfuAfGfAfuGfgUfgUfuAfuAfsusu-[Chol-TEG]-3′ (SEQ ID NO: 11445), antisense strand 5′-usAfsuAfaCfaCfcAfucuAfcCfuUfcsusu-3′ (SEQ ID NO: 11449)). Some embodiments include any one of ETD00342, ETD00343, ETD00344, ETD00345, ETD00346, ETD00752, ETD01040, or ETD1043 but without the modification patterns of any of SEQ ID NOs: 11172-11176, 11377, 11442, 11445, 11292-11296, 11306, 11443, 11449, or with different modifications or modification patterns than those SEQ ID NOs. A hydrophobic moiety, such as cholesterol, may also be attached to the siRNA. A ligand that binds to receptors on the cell surface, such as RGD to integrins, may also be attached to the siRNA. Hydrophobic groups may be combined with cell-targeting ligands to increase cellular uptake. The non-targeting control siRNA has the following sequence: sense strand 5′ GUUGUACAGCAUGCGGAGAUU 3′ (SEQ ID NO: 11091), antisense strand 5′ UCUCCGCAUGCUGUACAACUU 3′ (SEQ ID NO: 11092).

[1274] At designated time points, an eye speculum is placed followed by a drop of proparacaine hydrochloride 0.5% and 5% Betadine solution, and a rinse with sterile saline. IVT injections are performed according to the treatment assignments. IVT injections to the central vitreous are administered using a 31-gauge 0.375 inch needle inserted inferotemporally at the level of the ora serrata ˜2 mm posterior to the limbus. A topical triple antibiotic neomycin, polymyxin, bacitracin ophthalmic ointment (or equivalent) is administered following injections.

[1275] The study length is 44 days. siRNA or vehicle treatment occurs on day 0.

[1276] IOP is measured on days 3, 7, 14, 21, 28, 35, 42, and 44. At designated time points between 8:00 and 11:00 a.m., intraocular pressure (IOP) is measured OU within ten minutes of sedation after placement of the monkey in a supine position. IOP measures are performed with a TonoVet tonometer set to the dog (d) calibration setting. Three measures are taken from each eye at each examination time point and the mean IOP defined.

[1277] Once prior to dosing (baseline), on Days 3, 7, 21, and 42, slit lamp biomicroscopy is performed. Clinical ophthalmic findings are documented and quantified using a modified Hackett-McDonald nonhuman primate scoring system. A composite clinical score is calculated as the sum of scored components of the ophthalmic scoring system.

[1278] Once prior to dosing (baseline), on Days 21 and 42, color fundus imaging is performed. Once prior to dosing (baseline), on Days 21 and 42, retinal thickness is determined using color fundus imaging.

[1279] Animals are euthanized on day 44. Both eyes from each animal are harvested and dissected along the equator and each hemisphere is placed in RNAlater. Total RNA is extracted from homogenized tissue and reverse transcribed to cDNA using a First-Strand III cDNA Synthesis kit. Normalized cDNA quantification is carried out by real-time TaqMan® PCR using fluorescently labeled TaqMan® probes/primers sets of selected genes (ANGPTL7, MYOC, COL1A1, COL5A1, VCAN, FN1, and PPIA). Reactions are carried out in 20 μL aliquots using TaqMan® Universal PCR Master Mix No AmpErase UNG ran on an ABI Prism 7500 Fast Real-Time PCR System Sequence Detection System and analyzed by the 7500 System software. Relative Quantification (RQ) values between treated and untreated samples are calculated by the formula 2^{-ΔΔCT}, where C_{T} is the cycle at threshold (automatic measurement), ΔC_{T} is C_{T} of the assayed gene minus C_{T} of the endogenous control (PPIA), and ΔΔC_{T} is the ΔC_{T} of the normalized assayed gene in the treated sample minus the ΔC_{T} of the same gene in the untreated one (calibrator).

### Example 21. siRNA-Mediated Knockdown of ANGPTL7 Expression in Primary Human Trabecular Meshwork Cells in the Presence of Dexamethasone

[1280] In this experiment, the cell line ARPE-19 (ATCC® CRL-2302™) was used to evaluate gene knockdown by cholesterol-conjugated siRNAs targeting ANGPTL7. Cells were seeded in 96-well tissue culture plates at a density of 10,000 cells per well in DMEM:F12 (ATCC Catalog No. 30-2006) supplemented with 10% fetal bovine serum and incubated overnight in a water-jacketed, humidified incubator at 37° C. in an atmosphere composed of air plus 5% carbon dioxide. Once the cells reached 80% confluency, the media was replaced, and cells were serum starved in DMEM for 24 hrs in a water-jacketed, humidified incubator at 37° C. in an atmosphere composed of air plus 5% carbon dioxide. On Day 1, the media was replaced with 0.5 mL DMEM, 0.5 mL DMEM containing 1 uM negative control siRNA targeting luciferase sense strand: 5′-csusuaCfgCfUfGfaguacuucgasusu [cholTEG]-3′ (SEQ ID NO: 11523) and antisense strand: 5′-usCfsgaaGfuacucagCfgUfaagsusu-3′ (SEQ ID NO: 11540), or 0.5 mL DMEM containing 1 uM of siRNA's that target human ANGPTL7 from Table 19. In Table 19, Nf (e.g. Af, Uf, Cf, or GO includes a 2′-fluoro-modified nucleoside, n (e.g. a, u, c, or g) includes a 2′-O-methyl modified nucleoside, and “s” is a phosphorothioate linkage. The modified versions of EDT1066-EDT1070 were used in this experiment. The modified versions of the sense strands in Table 19 include the unmodified sequences (shown for reference), with modification pattern 2S in addition to a 3′ CholTEG moiety. The modified versions of the antisense strands in Table 19 include the unmodified sequences (shown for reference), with modification pattern 3AS.

TABLE 19
siRNA information

| | | Unmodified | Unmodified | Modified version- | Modified version- |
|---|---|---|---|---|---|
| Duplex | | version-sense | version-antisense | sense | antisense |
| number | Position | sequence 5′ to 3′ | sequence 5′ to 3′ | sequence 5′ to 3′ | sequence 5′ to 3′ |
| ETD | 1425 | UAUGUACCAAG | GUAACAUCCUUG | usasugUfaCfCfAfaggau | usUfsaacAfuccuugg |
| 1066 | | GAUGUUAC | GUACAUA (SEQ ID | guuacsusu (SEQ ID NO: | UfaCfauasusu (SEQ |
| | | (SEQ ID NO: | NO: 11534) | 11408)-[CholTEG] | ID NO: 11539) |
| | | 11529) | | | |
| ETD | 1429 | UACCAAGGAUG | UACUGUAACAUC | usasccAfaGfGfAfuguua | usAfscugUfaacaucc |
| 1067 | | UUACAGUA (SEQ | CUUGGUA (SEQ ID | caguasusu (SEQ ID NO: | UfuGfguasusu (SEQ |
| | | ID NO: 11530) | NO: 11535) | 11409)-[CholTEG] | ID NO: 11429) |
| ETD | 2087 | AACUGAAGGUA | ACACCAUCUACCU | asascuGfaAfGfGfuagau | asCfsaccAfucuaccu |
| 1068 | | GAUGGUGU | UCAGUU (SEQ ID | ggugususu (SEQ ID NO: | UfcAfguususu (SEQ |
| | | (SEQ ID NO: | NO: 11536) | 11417)-[CholTEG] | ID NO: 11437) |
| | | 11531) | | | |
| ETD | 2099 | AUGGUGUUAUA | UUAUUAACUAUA | asusggUfgUfUfAfuaguu | usUfsauuAfacuauaa |
| 1069 | | GUUAAUAA | ACACCAU (SEQ ID | aauaasusu (SEQ ID NO: | CfaCfcaususu (SEQ |
| | | (SEQ ID NO: | NO: 11537) | 11418)-[CholTEG] | ID NO: 11438) |
| | | 11532) | | | |
| ETD | 948 | CAAUGAACUCA | AUAGCUGUUGAG | csasauGfaAfCfUfcaacag | asUfsagcUfguugagu |
| 1070 | | ACAGCUAU (SEQ | UUCAUUG (SEQ ID | cuaususu (SEQ ID NO: | UfcAfuugsusu (SEQ |
| | | ID NO: 11533) | NO: 11538) | 11420)-[CholTEG] | ID NO: 11440) |

[1281] On Day 3, the delivery was repeated and media was replaced with 0.5 mL of fresh DMEM, 0.5 mL fresh DMEM containing 1 uM negative control siRNA targeting luciferase sense strand or 0.5 mL fresh DMEM containing 1 uM siRNA's ETD 1066-1070 (modified versions) in the appropriate wells.

[1282] On Day 5, total RNA was harvested from the cells and cDNA prepared using TaqMan® Fast Advanced Cells-to-CT™ Kit (ThermoFisher, Catalog #A35374) according to the manufacturer's instructions. The level of ANGPTL7 mRNA from cells in each well was measured in triplicate by real-time qPCR on an Applied Biosystems QuantStudio 6 Pro real-time PCR machine using TaqMan Gene Expression Assay for human ANGPTL7 (ThermoFisher, assay #Hs00221727m1). The level of PPIA mRNA was measured using TaqMan Gene Expression Assay (ThermoFisher, assay#Hs99999904 ml) and used to determine relative ANGPTL7 mRNA levels from cells in each well using the delta-delta Ct method. All data were normalized to relative ANGPTL7 mRNA levels in cells treated with luciferase control. Results are shown in Table 20. Results indicate primary ARPE cells treated with luciferase siRNA had much higher levels of ANGPTL7 mRNA than cells treated with ANGPTL7 targeting siRNA's. Thus, cholesterol-conjugated siRNAs that target ANGPTL7 may be useful in one or more of the methods or compositions described herein.

TABLE 20
Knockdown of ANGPTL7 expression by
ETD1066-ETD1070 in ARPE-19 Cells

| siRNA name | Relative ANGPTL7 mRNA |
|---|---|
| Luc siRNA | 1.00 |
| ETD1066 | 0.28 |
| ETD1067 | 0.32 |
| ETD1068 | 0.49 |
| ETD1069 | 0.41 |
| ETD1070 | 0.21 |

### Example 22. Screening ANGPTL7 siRNAs for Activity in Human Cells in Culture

[1283] Chemically modified ANGPTL7 siRNAs cross reactive for human and non-human primate and derived from sequences in siRNA subset C were assayed for ANGPTL7 mRNA knockdown activity in cells in culture. ARPE-19 (ATCC® CRL-2302™) cells were seeded in 96-well tissue culture plates at a cell density of 7,500 cells per well in DMEM:F12 (ATCC Catalog No. 30-2006) supplemented with 10% fetal bovine serum and incubated overnight in a water-jacketed, humidified incubator at 37° C. in an atmosphere composed of air plus 5% carbon dioxide. The ANGPTL7 siRNAs were individually transfected into ARPE-19 cells in duplicate wells at 10 nM final concentration using 0.3 μL Lipofectamine RNAiMax (Fisher) per well. Silencer Select Negative Control #1 (ThermoFisher, Catalog #4390843) was transfected at 10 nM final concentration as a control. After incubation for 48 hours at 37° C., total RNA was harvested from each well and cDNA prepared using TaqMan® Fast Advanced Cells-to-CT™ Kit (ThermoFisher, Catalog #A35374) according to the manufacturer's instructions. The level of ANGPTL7 mRNA from each well was measured in triplicate by real-time qPCR on an Applied Biosystems 7500 Fast Real-Time PCR machine using TaqMan Gene Expression Assay for human ANGPTL7 (ThermoFisher, assay #Hs00221727_m1). The level of PPIA mRNA was measured using TaqMan Gene Expression Assay (ThermoFisher, assay #Hs99999904_m1) and used to determine relative ANGPTL7 mRNA levels in each well using the delta-delta Ct method. All data were normalized to relative ANGPTL7 mRNA levels in untreated ARPE-19 cells. Details of the siRNAs used in this experiment are included in Table 21. Results are shown in Table 22. The results indicate a surprising utility of these siRNAs for reducing expression of ANGPTL7 mRNA or protein, and further indicate their usefulness in treating a disease described herein, such as an eye disease.

TABLE 21
Sequences of some ANGPLT7-Specific siRNAs

| EMP | | | |
|---|---|---|---|
| duplex | | | |
| number | Modified Sense strand | Modified Antisense strand | Notes |
| ETD01172 | asUfsaUfgUfaCfCfaaggaUfgUfUfasusu | usAfsaCfaUfcCfuUfgguAfcAfuAfususu | SS all |
| | (SEQ ID NO: 11545) | (SEQ ID NO: 11306) | purines |
| | | | OMe |
| ETD01173 | AfsusAfuGfuAfccAfAfGfGfAfuGfuuAfsusu | usAfsaCfaUfcCfuUfgguAfcAfuAfususu | SS all |
| | (SEQ ID NO: 11546) | (SEQ ID NO: 11306) | pyrimidines |
| | | | OMe |
| ETD01174 | AfsusAfuGfuAfcCfaAfgGfaUfgUfuAfsusu | usAfsacauccuugGfuAfcAfuAfususu | AS all |
| | (SEQ ID NO: 11500) | (SEQ ID NO: 11547) | pyrimidines |
| | | | OMe |
| ETD01175 | AfsusAfuGfuAfcCfaAfgGfaUfgUfuAfsusu | usAfsAfcAfuccuugGfuAfcAfuAfususu | AS all |
| | (SEQ ID NO: 11500) | (SEQ ID NO: 11548) | pyrimidines |
| | | | OMe |

TABLE 22
Knockdown Activity of ANGPLT7-Specific
siRNAs at 10 nM in Human ARPE-19 Cells

| | Relative ANGPTL7 |
|---|---|
| siRNA name | Expression |
| Untreated Cells | 1.00 |
| ETD01172 | 0.31 |
| ETD01173 | 0.57 |
| ETD01174 | 0.39 |
| ETD01175 | 0.28 |

### Sequence Information

[1284] Some embodiments include one or more nucleic acid sequences from the non-limiting examples in the following table:

TABLE 23
Description of Sequences

| SEQ ID NO: | Description |
|---|---|
| 1-4412 | ANGPTL7 siRNA oligonucleotide sequences |
| 4413-11084 | ANGPTL7 antisense oligonucleotide sequences |
| 11085 | Full-length ANGPTL7 human mRNA (GenBank Acc.# |
| | NM_021146.4) |
| 11086 | Full-length ANGPTL7 human pre-mRNA (NC_000001.11 |
| | (11189289 . . . 11195981) |
| 11087 | Antisense oligonucleotide targeting ANGPTL7 (e.g. human, |
| | NHP, mouse, rat, dog) |
| 11088 | Non-targeting control antisense oligonucleotide |
| 11089 | Sense strand oligonucleotide targeting ANGPTL7 (e.g. |
| | human, NHP, mouse, rat, dog) |
| 11090 | Antisense strand oligonucleotide targeting ANGPTL7 |
| | (e.g. human, NHP, mouse, rat, dog) |
| 11091 | Sense strand non-targeting (control) oligonucleotide |
| 11092 | Antisense strand non-targeting (control) oligonucleotide |
| 11093-11332 | Modified human ANGPTL7 siRNA sequences |
| 11333-11376 | Modified human ANGPTL7 siRNA sequences that are |
| | cross-reactive with mouse |
| 11377 | ETD00752 sense strand |
| 11378 | ETD00153 sense strand |
| 11379 | ETD00153 antisense strand |
| 11380 | ASO modification pattern |
| 11381-11385 | Modification pattern 1S-5S |
| 11386-11389 | Modification pattern 1AS-4AS |
| 11390-11393 | Peptide moieties |
| 11394-11398 | Modification pattern 6S-10S |
| 11399-11401 | Modification pattern 6AS-8AS |
| 11402-11449 | Modified human ANGPTL7 siRNA sequences |
| 11450-11499 | ANGPTL7 siRNA oligonucleotide sequences |
| 11500-11507 | Modified human ANGPTL7 siRNA sequences |
| 11508-11511 | Modification patterns 11S-14S |
| 11512-11519 | ANGPTL7 siRNA oligonucleotide sequences |
| 11520 | ETD00910 sense strand |
| 11521 | ETD00914 sense strand |
| 11522 | ETD01046 sense strand |
| 11523 | ETD01053 sense strand |
| 11524 | ETD00910 antisense strand |
| 11525 | ETD00914 antisense strand |
| 11526 | ETD01046 antisense strand |
| 11527 | ETD01053 antisense strand |
| 11528 | Control antisense strand |
| 11529-11538 | EDT1066-EDT1070 unmodified sequences |
| 11539 | EDT1067 modified version |
| 11540 | Control antisense strand |
| 11541 | Modification Pattern 15S |
| 11542 | Modification Pattern 16S |
| 11543 | Modification Pattern 9AS |
| 11544 | Modification Pattern 10AS |
| 11545 | ETD01172 sense strand |
| 11546 | ETD01173 sense strand |
| 11547 | ETD01174 antisense strand |
| 11548 | ETD01175 antisense strand |

We claim:

1. A composition comprising an oligonucleotide that targets Angiopoietin-like 7 (ANGPTL7) and when administered to a cell decreases expression of ANGPTL7, wherein the oligonucleotide comprises a small interfering RNA (siRNA) comprising a sense strand and an antisense strand, and
wherein:
(i) the sense strand comprises a modification pattern selected from the group consisting of: 5′-NfsnsNfnNfnNfnNfnNfnNfnNfnNfnNfsnsn-3′ (modification pattern 6S, SEQ ID NO: 11394), 5′-nsNfsnNfnNfnNfNfnnnnnNfnNfNfnsnsn-3′ (modification pattern 15S, SEQ ID NO: 11541), and 5′-NfsnsNfnNfnNfnnNfNfNfNfNfnNfnnNfsnsn-3′ (modification pattern 16S, SEQ ID NO: 11542);
(ii) the antisense strand comprises a modification pattern selected from the group consisting of: 5′-nsNfsnNfnNfnNfnNfnNfnNfnNfnNfnsnsn-3′ (modification pattern 6AS, SEQ ID NO: 11399), 5′-nsNfsnNfnNfnNfNfnnnnNfnNfnnnsnsn-3′ (modification pattern 7AS, SEQ ID NO: 11400), 5′-nsNfsnnnnnnnnnnnNfnnnnnsnsn-3′ (modification pattern 8AS, SEQ ID NO: 11401), 5′-nsNfsnnnnnnnnnNfnNfnNfnNfnsnsn-3′ (modification pattern 9AS, SEQ ID NO:11543), and 5′-nsNfsNfnNfnnnnnnNfnNfnNfnNfnsnsn-3′ (modification pattern 10AS, SEQ ID NO:11544); or
(iii) a combination of (i) and (ii),
wherein “Nf” is a 2′-fluoro-modified nucleoside, “n” is a 2′-O-methyl modified nucleoside, and “s” is a phosphorothioate linkage.

2. The composition of claim 1, wherein the oligonucleotide comprises a lipid attached at a 3′ or a 5′ terminus of the oligonucleotide.

3. The composition of claim 2, wherein the oligonucleotide comprises a lipid attached at a 3′ terminus of the sense strand.

4. The composition of claim 2, wherein the oligonucleotide comprises a lipid attached at a 5′ terminus of the sense strand.

5. A composition comprising an oligonucleotide that targets Angiopoietin-like 7 (ANGPTL7) and when administered to a cell decreases expression of ANGPTL7, wherein the oligonucleotide comprises a small interfering RNA (siRNA) comprising a sense strand and an antisense strand, and
wherein the sense strand comprises the modification pattern of: 5′-nsnsnnNfnNfnNfnnnnnnnnnnsnsn-Lipid-3′ (SEQ ID NO: 11396),
wherein “Nf” is a 2′-fluoro-modified nucleoside, “n” is a 2′-O-methyl modified nucleoside, and “s” is a phosphorothioate linkage.

6. The composition of claim 1 or 5, wherein the lipid is selected from the group consisting of: cholesterol, myristoyl, palmitoyl, stearoyl, lithocholoyl, docosanoyl, docosahexaenoyl, myristyl, palmityl stearyl, α-tocopherol, and any combination thereof.

7. The composition of claim 6, wherein the lipid comprises cholesterol.

8. The composition of claim 1 or 5, wherein the oligonucleotide further comprises an arginine-glycine-aspartic acid (RGD) peptide attached at a 3′ or 5′ terminus of the oligonucleotide.

9. The composition of claim 8, wherein the RGD peptide is selected from the group consisting of: Cyclo(-Arg-Gly-Asp-D-Phe-Cys), Cyclo(-Arg-Gly-Asp-D-Phe-Lys), Cyclo(-Arg-Gly-Asp-D-Phe-azido), an amino benzoic acid derived RGD, and any combination thereof.

10. The composition of claim 1 or 5, wherein the antisense strand is complementary to a portion of a nucleic acid having the nucleoside sequence of SEQ ID NO: 11085.

11. The composition of claim 1 or 5, wherein the sense strand and the antisense strand each have 14 to 30 nucleotides.

12. The composition of claim 1 or 5, wherein the sense strand comprises a nucleoside sequence having at least 85% sequence identity to any one of SEQ ID NOS: 1-2206, 11450-11474, or 11529-11533.

13. The composition of claim 1 or 5, wherein the sense strand comprises the nucleoside sequence of any one of SEQ ID NOS: 1-2206, 11450-11474, or 11529-11533, ora sense strand sequence thereof having 1 or 2 nucleoside substitutions, additions, or deletions.

14. The composition of claim 1 or 5, wherein the sense strand comprises the nucleoside sequence of any one of SEQ ID NOS: 1-2206, 11450-11474, or 11529-11533.

15. The composition of claim 1 or 5, wherein the sense strand consists of the nucleoside sequence of any one of SEQ ID NOS: 1-2206, 11450-11474, or 11529-11533.

16. The composition of claim 1 or 5, wherein the sense strand comprises one of SEQ ID NOS: 11470, 11473, or 11474.

17. The composition of claim 12, wherein the antisense strand comprises a nucleoside sequence having at least 85% sequence identity to any one of SEQ ID NOS: 2207-4412, 11475-11499, or 11534-11538.

18. The composition of claim 13, wherein the antisense strand comprises the nucleoside sequence of any one of SEQ ID NOS: 2207-4412, 11475-11499, or 11534-11538, or an antisense strand sequence thereof having 1 or 2 nucleoside substitutions, additions, or deletions.

19. The composition of claim 14, wherein the antisense strand comprises the nucleoside sequence of any one of SEQ ID NOS: 2207-4412, 11475-11499, or 11534-11538.

20. The composition of claim 15, wherein the antisense strand consists of the nucleoside sequence of any one of SEQ ID NOS: 2207-4412, 11475-11499, or 11534-11538.

21. The composition of claim 16, wherein the antisense strand comprises one of SEQ ID NOS: 11495, 11498, or 11499.

22. The composition of claim 1, wherein the sense strand comprises the nucleobase sequence of SEQ ID NO: 11474 or a nucleobase sequence thereof having 1 or 2 nucleoside substitutions, additions, or deletions relative to the nucleobase sequence of SEQ ID NO: 11474; and wherein the antisense strand comprises the nucleobase sequence of SEQ ID NO: 11499 or a nucleobase sequence thereof having 1 or 2 nucleoside substitutions, additions, or deletions relative to the nucleobase sequence of SEQ ID NO: 11499.

23. The composition of claim 1, wherein the sense strand comprises the nucleobase sequence of SEQ ID NO: 11474, and the antisense strand comprises the nucleobase sequence of SEQ ID NO: 11499.

24. The composition of claim 22 or 23, wherein the sense strand comprises the nucleotide sequence of SEQ ID NO: 11545.

25. The composition of claim 24, wherein the antisense strand comprises the nucleotide sequence of SEQ ID NO: 11306.

26. The composition of claim 22 or 23, wherein the sense strand comprises the nucleotide sequence of SEQ ID NO: 11546.

27. The composition of claim 26, wherein the antisense strand comprises the nucleotide sequence of SEQ ID NO: 11306.

28. The composition of claim 22 or 23, wherein the antisense strand comprises the nucleotide sequence of SEQ ID NO: 11547.

29. The composition of claim 28, wherein the sense strand comprises the modified sequence of SEQ ID NO: 11500.

30. The composition of claim 22 or 23, wherein the antisense strand comprises the nucleotide sequence of SEQ ID NO: 11548.

31. The composition of claim 30, wherein the sense strand comprises the nucleotide sequence of SEQ ID NO: 11500.

32. A composition comprising an oligonucleotide that targets Angiopoietin like 7 (ANGPTL7) and when administered to a cell decreases expression of ANGPTL7, wherein the oligonucleotide comprises a small interfering RNA (siRNA) comprising a sense strand comprising a nucleoside sequence having at least 85% sequence identity to any one of SEQ ID NOS: 11402-11421, 11442-11445, or 11500-11503; and an antisense strand comprising a nucleoside sequence having at least 85% sequence identity to any one of SEQ ID NOS: 11422-11441, 11446-11449, or 11504-11507.

33. The composition of claim 32, wherein the sense strand comprises the nucleoside sequence of any one of SEQ ID NOS: 11402-11421, 11442-11445, or 11500-11503, ora sense strand sequence thereof having 1 or 2 nucleoside substitutions, additions, or deletions.

34. The composition of claim 32, wherein the sense strand comprises the nucleoside sequence of any one of SEQ ID NOS: 11402-11421, 11442-11445, or 11500-11503.

35. The composition of claim 32, wherein the sense strand consists of the nucleoside sequence of any one of SEQ ID NOS: 11402-11421, 11442-11445, or 11500-11503.

36. The composition of claim 32, wherein the antisense strand comprises the nucleoside sequence of any one of SEQ ID NOS: 11422-11441, 11446-11449, or 11504-11507, or an antisense strand sequence thereof having 1 or 2 nucleoside substitutions, additions, or deletions.

37. The composition of claim 32, wherein the antisense strand comprises the nucleoside sequence of any one of SEQ ID NOS: 11422-11441, 11446-11449, or 11504-11507.

38. The composition of claim 32, wherein the antisense strand consists of the nucleoside sequence of any one of SEQ ID NOS: 11422-11441, 11446-11449, or 11504-11507.

39. A composition comprising an oligonucleotide that targets Angiopoietin like 7 (ANGPTL7) and when administered to a cell decreases expression of ANGPTL7, wherein the oligonucleotide comprises a small interfering RNA (siRNA) comprising a sense strand comprising a nucleoside sequence of any one of SEQ ID NOS: 11377, 11442, 11445, 11500, 11501, 11502, or 11503; and an antisense strand comprising a nucleoside sequence of any one of SEQ ID NOS: 11306, 11446, 11449, 11504, 11505, 11506, or 11507.

40. The composition of claim 39, wherein the sense strand consists of a nucleoside sequence of any one of SEQ ID NOS: 11377, 11442, 11445, 11500, 11501, 11502, or 11503.

41. The composition of claim 39, wherein the antisense strand consists of a nucleoside sequence of any one of SEQ ID NOS: 11306, 11446, 11449, 11504, 11505, 11506, or 11507.

42. A pharmaceutical composition comprising:
(a) a composition of claim 1, 5, 22 or 39; and
(b) a pharmaceutically acceptable carrier.

43. A method of decreasing expression of Angiopoietin-like 7 (ANGPTL7) in a cell, the method comprising administering to the cell the pharmaceutical composition of claim 42, thereby decreasing expression of ANGPTL7 in the cell.

44. A method of treating an ocular disorder in a subject in need thereof, the method comprising administering to the subject a therapeutically effective amount of the pharmaceutical composition of claim 42, thereby treating the ocular disorder in the subject.

45. The method of claim 44, wherein the ocular disorder comprises a glaucoma.

46. The method of claim 44, wherein the composition decreases intraocular pressure in an eye of the subject relative to a baseline intraocular pressure measurement obtained from the subject prior to administering the composition to the subject.

47. The method of claim 46, wherein the composition decreases the intraocular pressure in the eye of the subject by at least 10% relative to the baseline intraocular pressure measurement.

The application's sequence listing, which the Patent Office published only in electronic form, follows.

SEQUENCE LISTING (11548 sequences)

SEQ ID NO: 1 - RNA, 19 nt, Artificial Sequence
  Description of Artificial Sequence: Synthetic oligonucleotide
gggcuuggaaggaaagcua

SEQ ID NO: 2 - RNA, 19 nt, Artificial Sequence
  Description of Artificial Sequence: Synthetic oligonucleotide
ggcuuggaaggaaagcuau

SEQ ID NO: 3 - RNA, 19 nt, Artificial Sequence
  Description of Artificial Sequence: Synthetic oligonucleotide
gcuuggaaggaaagcuaua

SEQ ID NO: 4 - RNA, 19 nt, Artificial Sequence
  Description of Artificial Sequence: Synthetic oligonucleotide
cuuggaaggaaagcuauag

SEQ ID NO: 5 - RNA, 19 nt, Artificial Sequence
  Description of Artificial Sequence: Synthetic oligonucleotide
uuggaaggaaagcuauagg

SEQ ID NO: 6 - RNA, 19 nt, Artificial Sequence
  Description of Artificial Sequence: Synthetic oligonucleotide
uggaaggaaagcuauaggc

SEQ ID NO: 7 - RNA, 19 nt, Artificial Sequence
  Description of Artificial Sequence: Synthetic oligonucleotide
ggaaggaaagcuauaggcu

SEQ ID NO: 8 - RNA, 19 nt, Artificial Sequence
  Description of Artificial Sequence: Synthetic oligonucleotide
gaaggaaagcuauaggcua

SEQ ID NO: 9 - RNA, 19 nt, Artificial Sequence
  Description of Artificial Sequence: Synthetic oligonucleotide
aaggaaagcuauaggcuac

SEQ ID NO: 10 - RNA, 19 nt, Artificial Sequence
  Description of Artificial Sequence: Synthetic oligonucleotide
aggaaagcuauaggcuacc

SEQ ID NO: 11 - RNA, 19 nt, Artificial Sequence
  Description of Artificial Sequence: Synthetic oligonucleotide
ggaaagcuauaggcuaccc

SEQ ID NO: 12 - RNA, 19 nt, Artificial Sequence
  Description of Artificial Sequence: Synthetic oligonucleotide
gaaagcuauaggcuaccca

SEQ ID NO: 13 - RNA, 19 nt, Artificial Sequence
  Description of Artificial Sequence: Synthetic oligonucleotide
aaagcuauaggcuacccau

SEQ ID NO: 14 - RNA, 19 nt, Artificial Sequence
  Description of Artificial Sequence: Synthetic oligonucleotide
aagcuauaggcuacccauu

SEQ ID NO: 15 - RNA, 19 nt, Artificial Sequence
  Description of Artificial Sequence: Synthetic oligonucleotide
agcuauaggcuacccauuc

SEQ ID NO: 16 - RNA, 19 nt, Artificial Sequence
  Description of Artificial Sequence: Synthetic oligonucleotide
gcuauaggcuacccauuca

SEQ ID NO: 17 - RNA, 19 nt, Artificial Sequence
  Description of Artificial Sequence: Synthetic oligonucleotide
cuauaggcuacccauucag

SEQ ID NO: 18 - RNA, 19 nt, Artificial Sequence
  Description of Artificial Sequence: Synthetic oligonucleotide
uauaggcuacccauucagc

SEQ ID NO: 19 - RNA, 19 nt, Artificial Sequence
  Description of Artificial Sequence: Synthetic oligonucleotide
auaggcuacccauucagcu

SEQ ID NO: 20 - RNA, 19 nt, Artificial Sequence
  Description of Artificial Sequence: Synthetic oligonucleotide
uaggcuacccauucagcuc

SEQ ID NO: 21 - RNA, 19 nt, Artificial Sequence
  Description of Artificial Sequence: Synthetic oligonucleotide
aggcuacccauucagcucc

SEQ ID NO: 22 - RNA, 19 nt, Artificial Sequence
  Description of Artificial Sequence: Synthetic oligonucleotide
ggcuacccauucagcuccc

SEQ ID NO: 23 - RNA, 19 nt, Artificial Sequence
  Description of Artificial Sequence: Synthetic oligonucleotide
gcuacccauucagcucccc

SEQ ID NO: 24 - RNA, 19 nt, Artificial Sequence
  Description of Artificial Sequence: Synthetic oligonucleotide
cuacccauucagcuccccu

SEQ ID NO: 25 - RNA, 19 nt, Artificial Sequence
  Description of Artificial Sequence: Synthetic oligonucleotide
uacccauucagcuccccug

SEQ ID NO: 26 - RNA, 19 nt, Artificial Sequence
  Description of Artificial Sequence: Synthetic oligonucleotide
acccauucagcuccccugu

SEQ ID NO: 27 - RNA, 19 nt, Artificial Sequence
  Description of Artificial Sequence: Synthetic oligonucleotide
cccauucagcuccccuguc

SEQ ID NO: 28 - RNA, 19 nt, Artificial Sequence
  Description of Artificial Sequence: Synthetic oligonucleotide
ccauucagcuccccuguca

SEQ ID NO: 29 - RNA, 19 nt, Artificial Sequence
  Description of Artificial Sequence: Synthetic oligonucleotide
cauucagcuccccugucag

SEQ ID NO: 30 - RNA, 19 nt, Artificial Sequence
  Description of Artificial Sequence: Synthetic oligonucleotide
auucagcuccccugucaga

SEQ ID NO: 31 - RNA, 19 nt, Artificial Sequence
  Description of Artificial Sequence: Synthetic oligonucleotide
uucagcuccccugucagag

SEQ ID NO: 32 - RNA, 19 nt, Artificial Sequence
  Description of Artificial Sequence: Synthetic oligonucleotide
ucagcuccccugucagaga

SEQ ID NO: 33 - RNA, 19 nt, Artificial Sequence
  Description of Artificial Sequence: Synthetic oligonucleotide
cagcuccccugucagagac

SEQ ID NO: 34 - RNA, 19 nt, Artificial Sequence
  Description of Artificial Sequence: Synthetic oligonucleotide
agcuccccugucagagacu

SEQ ID NO: 35 - RNA, 19 nt, Artificial Sequence
  Description of Artificial Sequence: Synthetic oligonucleotide
gcuccccugucagagacuc

SEQ ID NO: 36 - RNA, 19 nt, Artificial Sequence
  Description of Artificial Sequence: Synthetic oligonucleotide
cuccccugucagagacuca

SEQ ID NO: 37 - RNA, 19 nt, Artificial Sequence
  Description of Artificial Sequence: Synthetic oligonucleotide
uccccugucagagacucaa

SEQ ID NO: 38 - RNA, 19 nt, Artificial Sequence
  Description of Artificial Sequence: Synthetic oligonucleotide
ccccugucagagacucaag

SEQ ID NO: 39 - RNA, 19 nt, Artificial Sequence
  Description of Artificial Sequence: Synthetic oligonucleotide
cccugucagagacucaagc

SEQ ID NO: 40 - RNA, 19 nt, Artificial Sequence
  Description of Artificial Sequence: Synthetic oligonucleotide
ccugucagagacucaagcu

SEQ ID NO: 41 - RNA, 19 nt, Artificial Sequence
  Description of Artificial Sequence: Synthetic oligonucleotide
cugucagagacucaagcuu

SEQ ID NO: 42 - RNA, 19 nt, Artificial Sequence
  Description of Artificial Sequence: Synthetic oligonucleotide
ugucagagacucaagcuuu

SEQ ID NO: 43 - RNA, 19 nt, Artificial Sequence
  Description of Artificial Sequence: Synthetic oligonucleotide
gucagagacucaagcuuug

SEQ ID NO: 44 - RNA, 19 nt, Artificial Sequence
  Description of Artificial Sequence: Synthetic oligonucleotide
ucagagacucaagcuuuga

SEQ ID NO: 45 - RNA, 19 nt, Artificial Sequence
  Description of Artificial Sequence: Synthetic oligonucleotide
cagagacucaagcuuugag

SEQ ID NO: 46 - RNA, 19 nt, Artificial Sequence
  Description of Artificial Sequence: Synthetic oligonucleotide
agagacucaagcuuugaga

SEQ ID NO: 47 - RNA, 19 nt, Artificial Sequence
  Description of Artificial Sequence: Synthetic oligonucleotide
gagacucaagcuuugagaa

SEQ ID NO: 48 - RNA, 19 nt, Artificial Sequence
  Description of Artificial Sequence: Synthetic oligonucleotide
agacucaagcuuugagaaa

SEQ ID NO: 49 - RNA, 19 nt, Artificial Sequence
  Description of Artificial Sequence: Synthetic oligonucleotide
gacucaagcuuugagaaag

SEQ ID NO: 50 - RNA, 19 nt, Artificial Sequence
  Description of Artificial Sequence: Synthetic oligonucleotide
acucaagcuuugagaaagg

SEQ ID NO: 51 - RNA, 19 nt, Artificial Sequence
  Description of Artificial Sequence: Synthetic oligonucleotide
cucaagcuuugagaaaggc

SEQ ID NO: 52 - RNA, 19 nt, Artificial Sequence
  Description of Artificial Sequence: Synthetic oligonucleotide
ucaagcuuugagaaaggcu

SEQ ID NO: 53 - RNA, 19 nt, Artificial Sequence
  Description of Artificial Sequence: Synthetic oligonucleotide
caagcuuugagaaaggcua

SEQ ID NO: 54 - RNA, 19 nt, Artificial Sequence
  Description of Artificial Sequence: Synthetic oligonucleotide
aagcuuugagaaaggcuag

SEQ ID NO: 55 - RNA, 19 nt, Artificial Sequence
  Description of Artificial Sequence: Synthetic oligonucleotide
agcuuugagaaaggcuagc

SEQ ID NO: 56 - RNA, 19 nt, Artificial Sequence
  Description of Artificial Sequence: Synthetic oligonucleotide
gcuuugagaaaggcuagca

SEQ ID NO: 57 - RNA, 19 nt, Artificial Sequence
  Description of Artificial Sequence: Synthetic oligonucleotide
cuuugagaaaggcuagcaa

SEQ ID NO: 58 - RNA, 19 nt, Artificial Sequence
  Description of Artificial Sequence: Synthetic oligonucleotide
uuugagaaaggcuagcaaa

SEQ ID NO: 59 - RNA, 19 nt, Artificial Sequence
  Description of Artificial Sequence: Synthetic oligonucleotide
uugagaaaggcuagcaaag

SEQ ID NO: 60 - RNA, 19 nt, Artificial Sequence
  Description of Artificial Sequence: Synthetic oligonucleotide
ugagaaaggcuagcaaaga

SEQ ID NO: 61 - RNA, 19 nt, Artificial Sequence
  Description of Artificial Sequence: Synthetic oligonucleotide
gagaaaggcuagcaaagag

SEQ ID NO: 62 - RNA, 19 nt, Artificial Sequence
  Description of Artificial Sequence: Synthetic oligonucleotide
agaaaggcuagcaaagagc

SEQ ID NO: 63 - RNA, 19 nt, Artificial Sequence
  Description of Artificial Sequence: Synthetic oligonucleotide
gaaaggcuagcaaagagca

SEQ ID NO: 64 - RNA, 19 nt, Artificial Sequence
  Description of Artificial Sequence: Synthetic oligonucleotide
aaaggcuagcaaagagcaa

SEQ ID NO: 65 - RNA, 19 nt, Artificial Sequence
  Description of Artificial Sequence: Synthetic oligonucleotide
aaggcuagcaaagagcaag

SEQ ID NO: 66 - RNA, 19 nt, Artificial Sequence
  Description of Artificial Sequence: Synthetic oligonucleotide
aggcuagcaaagagcaagg

SEQ ID NO: 67 - RNA, 19 nt, Artificial Sequence
  Description of Artificial Sequence: Synthetic oligonucleotide
ggcuagcaaagagcaagga

SEQ ID NO: 68 - RNA, 19 nt, Artificial Sequence
  Description of Artificial Sequence: Synthetic oligonucleotide
gcuagcaaagagcaaggaa

SEQ ID NO: 69 - RNA, 19 nt, Artificial Sequence
  Description of Artificial Sequence: Synthetic oligonucleotide
cuagcaaagagcaaggaaa

SEQ ID NO: 70 - RNA, 19 nt, Artificial Sequence
  Description of Artificial Sequence: Synthetic oligonucleotide
uagcaaagagcaaggaaag

SEQ ID NO: 71 - RNA, 19 nt, Artificial Sequence
  Description of Artificial Sequence: Synthetic oligonucleotide
agcaaagagcaaggaaaga

SEQ ID NO: 72 - RNA, 19 nt, Artificial Sequence
  Description of Artificial Sequence: Synthetic oligonucleotide
gcaaagagcaaggaaagag

SEQ ID NO: 73 - RNA, 19 nt, Artificial Sequence
  Description of Artificial Sequence: Synthetic oligonucleotide
caaagagcaaggaaagaga

SEQ ID NO: 74 - RNA, 19 nt, Artificial Sequence
  Description of Artificial Sequence: Synthetic oligonucleotide
aaagagcaaggaaagagag

SEQ ID NO: 75 - RNA, 19 nt, Artificial Sequence
  Description of Artificial Sequence: Synthetic oligonucleotide
aagagcaaggaaagagaga

SEQ ID NO: 76 - RNA, 19 nt, Artificial Sequence
  Description of Artificial Sequence: Synthetic oligonucleotide
agagcaaggaaagagagaa

SEQ ID NO: 77 - RNA, 19 nt, Artificial Sequence
  Description of Artificial Sequence: Synthetic oligonucleotide
gagcaaggaaagagagaaa

SEQ ID NO: 78 - RNA, 19 nt, Artificial Sequence
  Description of Artificial Sequence: Synthetic oligonucleotide
agcaaggaaagagagaaaa

SEQ ID NO: 79 - RNA, 19 nt, Artificial Sequence
  Description of Artificial Sequence: Synthetic oligonucleotide
gcaaggaaagagagaaaac

SEQ ID NO: 80 - RNA, 19 nt, Artificial Sequence
  Description of Artificial Sequence: Synthetic oligonucleotide
caaggaaagagagaaaaca

SEQ ID NO: 81 - RNA, 19 nt, Artificial Sequence
  Description of Artificial Sequence: Synthetic oligonucleotide
aaggaaagagagaaaacaa

SEQ ID NO: 82 - RNA, 19 nt, Artificial Sequence
  Description of Artificial Sequence: Synthetic oligonucleotide
aggaaagagagaaaacaac

SEQ ID NO: 83 - RNA, 19 nt, Artificial Sequence
  Description of Artificial Sequence: Synthetic oligonucleotide
ggaaagagagaaaacaaca

SEQ ID NO: 84 - RNA, 19 nt, Artificial Sequence
  Description of Artificial Sequence: Synthetic oligonucleotide
gaaagagagaaaacaacaa

SEQ ID NO: 85 - RNA, 19 nt, Artificial Sequence
  Description of Artificial Sequence: Synthetic oligonucleotide
aaagagagaaaacaacaaa

SEQ ID NO: 86 - RNA, 19 nt, Artificial Sequence
  Description of Artificial Sequence: Synthetic oligonucleotide
aagagagaaaacaacaaag

SEQ ID NO: 87 - RNA, 19 nt, Artificial Sequence
  Description of Artificial Sequence: Synthetic oligonucleotide
agagagaaaacaacaaagu

SEQ ID NO: 88 - RNA, 19 nt, Artificial Sequence
  Description of Artificial Sequence: Synthetic oligonucleotide
gagagaaaacaacaaagug

SEQ ID NO: 89 - RNA, 19 nt, Artificial Sequence
  Description of Artificial Sequence: Synthetic oligonucleotide
agagaaaacaacaaagugg

SEQ ID NO: 90 - RNA, 19 nt, Artificial Sequence
  Description of Artificial Sequence: Synthetic oligonucleotide
gagaaaacaacaaaguggc

SEQ ID NO: 91 - RNA, 19 nt, Artificial Sequence
  Description of Artificial Sequence: Synthetic oligonucleotide
agaaaacaacaaaguggcg

SEQ ID NO: 92 - RNA, 19 nt, Artificial Sequence
  Description of Artificial Sequence: Synthetic oligonucleotide
gaaaacaacaaaguggcga

SEQ ID NO: 93 - RNA, 19 nt, Artificial Sequence
  Description of Artificial Sequence: Synthetic oligonucleotide
aaaacaacaaaguggcgag

SEQ ID NO: 94 - RNA, 19 nt, Artificial Sequence
  Description of Artificial Sequence: Synthetic oligonucleotide
aaacaacaaaguggcgagg

SEQ ID NO: 95 - RNA, 19 nt, Artificial Sequence
  Description of Artificial Sequence: Synthetic oligonucleotide
aacaacaaaguggcgaggc

SEQ ID NO: 96 - RNA, 19 nt, Artificial Sequence
  Description of Artificial Sequence: Synthetic oligonucleotide
acaacaaaguggcgaggcc

SEQ ID NO: 97 - RNA, 19 nt, Artificial Sequence
  Description of Artificial Sequence: Synthetic oligonucleotide
caacaaaguggcgaggccc

SEQ ID NO: 98 - RNA, 19 nt, Artificial Sequence
  Description of Artificial Sequence: Synthetic oligonucleotide
aacaaaguggcgaggcccu

SEQ ID NO: 99 - RNA, 19 nt, Artificial Sequence
  Description of Artificial Sequence: Synthetic oligonucleotide
acaaaguggcgaggcccuc

SEQ ID NO: 100 - RNA, 19 nt, Artificial Sequence
  Description of Artificial Sequence: Synthetic oligonucleotide
caaaguggcgaggcccuca

SEQ ID NO: 101 - RNA, 19 nt, Artificial Sequence
  Description of Artificial Sequence: Synthetic oligonucleotide
aaaguggcgaggcccucag

SEQ ID NO: 102 - RNA, 19 nt, Artificial Sequence
  Description of Artificial Sequence: Synthetic oligonucleotide
aaguggcgaggcccucaga

SEQ ID NO: 103 - RNA, 19 nt, Artificial Sequence
  Description of Artificial Sequence: Synthetic oligonucleotide
aguggcgaggcccucagag

SEQ ID NO: 104 - RNA, 19 nt, Artificial Sequence
  Description of Artificial Sequence: Synthetic oligonucleotide
guggcgaggcccucagagu

SEQ ID NO: 105 - RNA, 19 nt, Artificial Sequence
  Description of Artificial Sequence: Synthetic oligonucleotide
uggcgaggcccucagagug

SEQ ID NO: 106 - RNA, 19 nt, Artificial Sequence
  Description of Artificial Sequence: Synthetic oligonucleotide
ggcgaggcccucagaguga

SEQ ID NO: 107 - RNA, 19 nt, Artificial Sequence
  Description of Artificial Sequence: Synthetic oligonucleotide
gcgaggcccucagagugaa

SEQ ID NO: 108 - RNA, 19 nt, Artificial Sequence
  Description of Artificial Sequence: Synthetic oligonucleotide
cgaggcccucagagugaaa

SEQ ID NO: 109 - RNA, 19 nt, Artificial Sequence
  Description of Artificial Sequence: Synthetic oligonucleotide
gaggcccucagagugaaag

SEQ ID NO: 110 - RNA, 19 nt, Artificial Sequence
  Description of Artificial Sequence: Synthetic oligonucleotide
aggcccucagagugaaagc

SEQ ID NO: 111 - RNA, 19 nt, Artificial Sequence
  Description of Artificial Sequence: Synthetic oligonucleotide
ggcccucagagugaaagcg

SEQ ID NO: 112 - RNA, 19 nt, Artificial Sequence
  Description of Artificial Sequence: Synthetic oligonucleotide
gcccucagagugaaagcgu

SEQ ID NO: 113 - RNA, 19 nt, Artificial Sequence
  Description of Artificial Sequence: Synthetic oligonucleotide
cccucagagugaaagcgua

SEQ ID NO: 114 - RNA, 19 nt, Artificial Sequence
  Description of Artificial Sequence: Synthetic oligonucleotide
ccucagagugaaagcguaa

SEQ ID NO: 115 - RNA, 19 nt, Artificial Sequence
  Description of Artificial Sequence: Synthetic oligonucleotide
cucagagugaaagcguaag

SEQ ID NO: 116 - RNA, 19 nt, Artificial Sequence
  Description of Artificial Sequence: Synthetic oligonucleotide
ucagagugaaagcguaagg

SEQ ID NO: 117 - RNA, 19 nt, Artificial Sequence
  Description of Artificial Sequence: Synthetic oligonucleotide
cagagugaaagcguaaggu

SEQ ID NO: 118 - RNA, 19 nt, Artificial Sequence
  Description of Artificial Sequence: Synthetic oligonucleotide
agagugaaagcguaagguu

SEQ ID NO: 119 - RNA, 19 nt, Artificial Sequence
  Description of Artificial Sequence: Synthetic oligonucleotide
gagugaaagcguaagguuc

SEQ ID NO: 120 - RNA, 19 nt, Artificial Sequence
  Description of Artificial Sequence: Synthetic oligonucleotide
agugaaagcguaagguuca

SEQ ID NO: 121 - RNA, 19 nt, Artificial Sequence
  Description of Artificial Sequence: Synthetic oligonucleotide
gugaaagcguaagguucag

SEQ ID NO: 122 - RNA, 19 nt, Artificial Sequence
  Description of Artificial Sequence: Synthetic oligonucleotide
ugaaagcguaagguucagu

SEQ ID NO: 123 - RNA, 19 nt, Artificial Sequence
  Description of Artificial Sequence: Synthetic oligonucleotide
gaaagcguaagguucaguc

SEQ ID NO: 124 - RNA, 19 nt, Artificial Sequence
  Description of Artificial Sequence: Synthetic oligonucleotide
aaagcguaagguucaguca

SEQ ID NO: 125 - RNA, 19 nt, Artificial Sequence
  Description of Artificial Sequence: Synthetic oligonucleotide
aagcguaagguucagucag

SEQ ID NO: 126 - RNA, 19 nt, Artificial Sequence
  Description of Artificial Sequence: Synthetic oligonucleotide
agcguaagguucagucagc

SEQ ID NO: 127 - RNA, 19 nt, Artificial Sequence
  Description of Artificial Sequence: Synthetic oligonucleotide
gcguaagguucagucagcc

SEQ ID NO: 128 - RNA, 19 nt, Artificial Sequence
  Description of Artificial Sequence: Synthetic oligonucleotide
cguaagguucagucagccu

SEQ ID NO: 129 - RNA, 19 nt, Artificial Sequence
  Description of Artificial Sequence: Synthetic oligonucleotide
guaagguucagucagccug

SEQ ID NO: 130 - RNA, 19 nt, Artificial Sequence
  Description of Artificial Sequence: Synthetic oligonucleotide
uaagguucagucagccugc

SEQ ID NO: 131 - RNA, 19 nt, Artificial Sequence
  Description of Artificial Sequence: Synthetic oligonucleotide
aagguucagucagccugcu

SEQ ID NO: 132 - RNA, 19 nt, Artificial Sequence
  Description of Artificial Sequence: Synthetic oligonucleotide
agguucagucagccugcug

SEQ ID NO: 133 - RNA, 19 nt, Artificial Sequence
  Description of Artificial Sequence: Synthetic oligonucleotide
gguucagucagccugcugc

SEQ ID NO: 134 - RNA, 19 nt, Artificial Sequence
  Description of Artificial Sequence: Synthetic oligonucleotide
guucagucagccugcugca

SEQ ID NO: 135 - RNA, 19 nt, Artificial Sequence
  Description of Artificial Sequence: Synthetic oligonucleotide
uucagucagccugcugcag

SEQ ID NO: 136 - RNA, 19 nt, Artificial Sequence
  Description of Artificial Sequence: Synthetic oligonucleotide
ucagucagccugcugcagc

SEQ ID NO: 137 - RNA, 19 nt, Artificial Sequence
  Description of Artificial Sequence: Synthetic oligonucleotide
cagucagccugcugcagcu

SEQ ID NO: 138 - RNA, 19 nt, Artificial Sequence
  Description of Artificial Sequence: Synthetic oligonucleotide
agucagccugcugcagcuu

SEQ ID NO: 139 - RNA, 19 nt, Artificial Sequence
  Description of Artificial Sequence: Synthetic oligonucleotide
gucagccugcugcagcuuu

SEQ ID NO: 140 - RNA, 19 nt, Artificial Sequence
  Description of Artificial Sequence: Synthetic oligonucleotide
ucagccugcugcagcuuug

SEQ ID NO: 141 - RNA, 19 nt, Artificial Sequence
  Description of Artificial Sequence: Synthetic oligonucleotide
cagccugcugcagcuuugc

SEQ ID NO: 142 - RNA, 19 nt, Artificial Sequence
  Description of Artificial Sequence: Synthetic oligonucleotide
agccugcugcagcuuugca

SEQ ID NO: 143 - RNA, 19 nt, Artificial Sequence
  Description of Artificial Sequence: Synthetic oligonucleotide
gccugcugcagcuuugcag

SEQ ID NO: 144 - RNA, 19 nt, Artificial Sequence
  Description of Artificial Sequence: Synthetic oligonucleotide
ccugcugcagcuuugcaga

SEQ ID NO: 145 - RNA, 19 nt, Artificial Sequence
  Description of Artificial Sequence: Synthetic oligonucleotide
cugcugcagcuuugcagac

SEQ ID NO: 146 - RNA, 19 nt, Artificial Sequence
  Description of Artificial Sequence: Synthetic oligonucleotide
ugcugcagcuuugcagacc

SEQ ID NO: 147 - RNA, 19 nt, Artificial Sequence
  Description of Artificial Sequence: Synthetic oligonucleotide
gcugcagcuuugcagaccu

SEQ ID NO: 148 - RNA, 19 nt, Artificial Sequence
  Description of Artificial Sequence: Synthetic oligonucleotide
cugcagcuuugcagaccuc

SEQ ID NO: 149 - RNA, 19 nt, Artificial Sequence
  Description of Artificial Sequence: Synthetic oligonucleotide
ugcagcuuugcagaccuca

SEQ ID NO: 150 - RNA, 19 nt, Artificial Sequence
  Description of Artificial Sequence: Synthetic oligonucleotide
gcagcuuugcagaccucag

SEQ ID NO: 151 - RNA, 19 nt, Artificial Sequence
  Description of Artificial Sequence: Synthetic oligonucleotide
cagcuuugcagaccucagc

SEQ ID NO: 152 - RNA, 19 nt, Artificial Sequence
  Description of Artificial Sequence: Synthetic oligonucleotide
agcuuugcagaccucagcu

SEQ ID NO: 153 - RNA, 19 nt, Artificial Sequence
  Description of Artificial Sequence: Synthetic oligonucleotide
gcuuugcagaccucagcug

SEQ ID NO: 154 - RNA, 19 nt, Artificial Sequence
  Description of Artificial Sequence: Synthetic oligonucleotide
cuuugcagaccucagcugg

SEQ ID NO: 155 - RNA, 19 nt, Artificial Sequence
  Description of Artificial Sequence: Synthetic oligonucleotide
uuugcagaccucagcuggg

SEQ ID NO: 156 - RNA, 19 nt, Artificial Sequence
  Description of Artificial Sequence: Synthetic oligonucleotide
uugcagaccucagcugggc

SEQ ID NO: 157 - RNA, 19 nt, Artificial Sequence
  Description of Artificial Sequence: Synthetic oligonucleotide
ugcagaccucagcugggca

SEQ ID NO: 158 - RNA, 19 nt, Artificial Sequence
  Description of Artificial Sequence: Synthetic oligonucleotide
gcagaccucagcugggcau

SEQ ID NO: 159 - RNA, 19 nt, Artificial Sequence
  Description of Artificial Sequence: Synthetic oligonucleotide
cagaccucagcugggcauc

SEQ ID NO: 160 - RNA, 19 nt, Artificial Sequence
  Description of Artificial Sequence: Synthetic oligonucleotide
agaccucagcugggcaucu

SEQ ID NO: 161 - RNA, 19 nt, Artificial Sequence
  Description of Artificial Sequence: Synthetic oligonucleotide
gaccucagcugggcaucuc

SEQ ID NO: 162 - RNA, 19 nt, Artificial Sequence
  Description of Artificial Sequence: Synthetic oligonucleotide
accucagcugggcaucucc

SEQ ID NO: 163 - RNA, 19 nt, Artificial Sequence
  Description of Artificial Sequence: Synthetic oligonucleotide
ccucagcugggcaucucca

SEQ ID NO: 164 - RNA, 19 nt, Artificial Sequence
  Description of Artificial Sequence: Synthetic oligonucleotide
cucagcugggcaucuccag

SEQ ID NO: 165 - RNA, 19 nt, Artificial Sequence
  Description of Artificial Sequence: Synthetic oligonucleotide
ucagcugggcaucuccaga

SEQ ID NO: 166 - RNA, 19 nt, Artificial Sequence
  Description of Artificial Sequence: Synthetic oligonucleotide
cagcugggcaucuccagac

SEQ ID NO: 167 - RNA, 19 nt, Artificial Sequence
  Description of Artificial Sequence: Synthetic oligonucleotide
agcugggcaucuccagacu

SEQ ID NO: 168 - RNA, 19 nt, Artificial Sequence
  Description of Artificial Sequence: Synthetic oligonucleotide
gcugggcaucuccagacuc

SEQ ID NO: 169 - RNA, 19 nt, Artificial Sequence
  Description of Artificial Sequence: Synthetic oligonucleotide
cugggcaucuccagacucc

SEQ ID NO: 170 - RNA, 19 nt, Artificial Sequence
  Description of Artificial Sequence: Synthetic oligonucleotide
ugggcaucuccagacuccc

SEQ ID NO: 171 - RNA, 19 nt, Artificial Sequence
  Description of Artificial Sequence: Synthetic oligonucleotide
gggcaucuccagacucccc

SEQ ID NO: 172 - RNA, 19 nt, Artificial Sequence
  Description of Artificial Sequence: Synthetic oligonucleotide
ggcaucuccagacuccccu

SEQ ID NO: 173 - RNA, 19 nt, Artificial Sequence
  Description of Artificial Sequence: Synthetic oligonucleotide
gcaucuccagacuccccug

SEQ ID NO: 174 - RNA, 19 nt, Artificial Sequence
  Description of Artificial Sequence: Synthetic oligonucleotide
caucuccagacuccccuga

SEQ ID NO: 175 - RNA, 19 nt, Artificial Sequence
  Description of Artificial Sequence: Synthetic oligonucleotide
aucuccagacuccccugaa

SEQ ID NO: 176 - RNA, 19 nt, Artificial Sequence
  Description of Artificial Sequence: Synthetic oligonucleotide
ucuccagacuccccugaag

SEQ ID NO: 177 - RNA, 19 nt, Artificial Sequence
  Description of Artificial Sequence: Synthetic oligonucleotide
cuccagacuccccugaagg

SEQ ID NO: 178 - RNA, 19 nt, Artificial Sequence
  Description of Artificial Sequence: Synthetic oligonucleotide
uccagacuccccugaagga

SEQ ID NO: 179 - RNA, 19 nt, Artificial Sequence
  Description of Artificial Sequence: Synthetic oligonucleotide
ccagacuccccugaaggaa

SEQ ID NO: 180 - RNA, 19 nt, Artificial Sequence
  Description of Artificial Sequence: Synthetic oligonucleotide
cagacuccccugaaggaag

SEQ ID NO: 181 - RNA, 19 nt, Artificial Sequence
  Description of Artificial Sequence: Synthetic oligonucleotide
agacuccccugaaggaaga

SEQ ID NO: 182 - RNA, 19 nt, Artificial Sequence
  Description of Artificial Sequence: Synthetic oligonucleotide
gacuccccugaaggaagag

SEQ ID NO: 183 - RNA, 19 nt, Artificial Sequence
  Description of Artificial Sequence: Synthetic oligonucleotide
acuccccugaaggaagagc

SEQ ID NO: 184 - RNA, 19 nt, Artificial Sequence
  Description of Artificial Sequence: Synthetic oligonucleotide
cuccccugaaggaagagcc

SEQ ID NO: 185 - RNA, 19 nt, Artificial Sequence
  Description of Artificial Sequence: Synthetic oligonucleotide
uccccugaaggaagagccu

SEQ ID NO: 186 - RNA, 19 nt, Artificial Sequence
  Description of Artificial Sequence: Synthetic oligonucleotide
ccccugaaggaagagccuu

SEQ ID NO: 187 - RNA, 19 nt, Artificial Sequence
  Description of Artificial Sequence: Synthetic oligonucleotide
cccugaaggaagagccuuc

SEQ ID NO: 188 - RNA, 19 nt, Artificial Sequence
  Description of Artificial Sequence: Synthetic oligonucleotide
ccugaaggaagagccuucc

SEQ ID NO: 189 - RNA, 19 nt, Artificial Sequence
  Description of Artificial Sequence: Synthetic oligonucleotide
cugaaggaagagccuuccu

SEQ ID NO: 190 - RNA, 19 nt, Artificial Sequence
  Description of Artificial Sequence: Synthetic oligonucleotide
ugaaggaagagccuuccuc

SEQ ID NO: 191 - RNA, 19 nt, Artificial Sequence
  Description of Artificial Sequence: Synthetic oligonucleotide
gaaggaagagccuuccuca

SEQ ID NO: 192 - RNA, 19 nt, Artificial Sequence
  Description of Artificial Sequence: Synthetic oligonucleotide
aaggaagagccuuccucac

SEQ ID NO: 193 - RNA, 19 nt, Artificial Sequence
  Description of Artificial Sequence: Synthetic oligonucleotide
aggaagagccuuccucacc

SEQ ID NO: 194 - RNA, 19 nt, Artificial Sequence
  Description of Artificial Sequence: Synthetic oligonucleotide
ggaagagccuuccucaccc

SEQ ID NO: 195 - RNA, 19 nt, Artificial Sequence
  Description of Artificial Sequence: Synthetic oligonucleotide
gaagagccuuccucaccca

SEQ ID NO: 196 - RNA, 19 nt, Artificial Sequence
  Description of Artificial Sequence: Synthetic oligonucleotide
aagagccuuccucacccaa

SEQ ID NO: 197 - RNA, 19 nt, Artificial Sequence
  Description of Artificial Sequence: Synthetic oligonucleotide
agagccuuccucacccaaa

SEQ ID NO: 198 - RNA, 19 nt, Artificial Sequence
  Description of Artificial Sequence: Synthetic oligonucleotide
gagccuuccucacccaaac

SEQ ID NO: 199 - RNA, 19 nt, Artificial Sequence
  Description of Artificial Sequence: Synthetic oligonucleotide
agccuuccucacccaaacc

SEQ ID NO: 200 - RNA, 19 nt, Artificial Sequence
  Description of Artificial Sequence: Synthetic oligonucleotide
gccuuccucacccaaaccc

SEQ ID NO: 201 - RNA, 19 nt, Artificial Sequence
  Description of Artificial Sequence: Synthetic oligonucleotide
ccuuccucacccaaaccca

SEQ ID NO: 202 - RNA, 19 nt, Artificial Sequence
  Description of Artificial Sequence: Synthetic oligonucleotide
cuuccucacccaaacccac

SEQ ID NO: 203 - RNA, 19 nt, Artificial Sequence
  Description of Artificial Sequence: Synthetic oligonucleotide
uuccucacccaaacccaca

SEQ ID NO: 204 - RNA, 19 nt, Artificial Sequence
  Description of Artificial Sequence: Synthetic oligonucleotide
uccucacccaaacccacaa

SEQ ID NO: 205 - RNA, 19 nt, Artificial Sequence
  Description of Artificial Sequence: Synthetic oligonucleotide
ccucacccaaacccacaaa

SEQ ID NO: 206 - RNA, 19 nt, Artificial Sequence
  Description of Artificial Sequence: Synthetic oligonucleotide
cucacccaaacccacaaaa

SEQ ID NO: 207 - RNA, 19 nt, Artificial Sequence
  Description of Artificial Sequence: Synthetic oligonucleotide
ucacccaaacccacaaaag

SEQ ID NO: 208 - RNA, 19 nt, Artificial Sequence
  Description of Artificial Sequence: Synthetic oligonucleotide
cacccaaacccacaaaaga

SEQ ID NO: 209 - RNA, 19 nt, Artificial Sequence
  Description of Artificial Sequence: Synthetic oligonucleotide
acccaaacccacaaaagau

SEQ ID NO: 210 - RNA, 19 nt, Artificial Sequence
  Description of Artificial Sequence: Synthetic oligonucleotide
cccaaacccacaaaagaug

SEQ ID NO: 211 - RNA, 19 nt, Artificial Sequence
  Description of Artificial Sequence: Synthetic oligonucleotide
ccaaacccacaaaagaugc

SEQ ID NO: 212 - RNA, 19 nt, Artificial Sequence
  Description of Artificial Sequence: Synthetic oligonucleotide
caaacccacaaaagaugcu

SEQ ID NO: 213 - RNA, 19 nt, Artificial Sequence
  Description of Artificial Sequence: Synthetic oligonucleotide
aaacccacaaaagaugcug

SEQ ID NO: 214 - RNA, 19 nt, Artificial Sequence
  Description of Artificial Sequence: Synthetic oligonucleotide
aacccacaaaagaugcuga

SEQ ID NO: 215 - RNA, 19 nt, Artificial Sequence
  Description of Artificial Sequence: Synthetic oligonucleotide
acccacaaaagaugcugaa

SEQ ID NO: 216 - RNA, 19 nt, Artificial Sequence
  Description of Artificial Sequence: Synthetic oligonucleotide
cccacaaaagaugcugaaa

SEQ ID NO: 217 - RNA, 19 nt, Artificial Sequence
  Description of Artificial Sequence: Synthetic oligonucleotide
ccacaaaagaugcugaaaa

SEQ ID NO: 218 - RNA, 19 nt, Artificial Sequence
  Description of Artificial Sequence: Synthetic oligonucleotide
cacaaaagaugcugaaaaa

SEQ ID NO: 219 - RNA, 19 nt, Artificial Sequence
  Description of Artificial Sequence: Synthetic oligonucleotide
acaaaagaugcugaaaaag

SEQ ID NO: 220 - RNA, 19 nt, Artificial Sequence
  Description of Artificial Sequence: Synthetic oligonucleotide
caaaagaugcugaaaaagc

SEQ ID NO: 221 - RNA, 19 nt, Artificial Sequence
  Description of Artificial Sequence: Synthetic oligonucleotide
aaaagaugcugaaaaagcc

SEQ ID NO: 222 - RNA, 19 nt, Artificial Sequence
  Description of Artificial Sequence: Synthetic oligonucleotide
aaagaugcugaaaaagccu

SEQ ID NO: 223 - RNA, 19 nt, Artificial Sequence
  Description of Artificial Sequence: Synthetic oligonucleotide
aagaugcugaaaaagccuc

SEQ ID NO: 224 - RNA, 19 nt, Artificial Sequence
  Description of Artificial Sequence: Synthetic oligonucleotide
agaugcugaaaaagccucu

SEQ ID NO: 225 - RNA, 19 nt, Artificial Sequence
  Description of Artificial Sequence: Synthetic oligonucleotide
gaugcugaaaaagccucuc

SEQ ID NO: 226 - RNA, 19 nt, Artificial Sequence
  Description of Artificial Sequence: Synthetic oligonucleotide
augcugaaaaagccucucu

SEQ ID NO: 227 - RNA, 19 nt, Artificial Sequence
  Description of Artificial Sequence: Synthetic oligonucleotide
ugcugaaaaagccucucuc

SEQ ID NO: 228 - RNA, 19 nt, Artificial Sequence
  Description of Artificial Sequence: Synthetic oligonucleotide
gcugaaaaagccucucuca

SEQ ID NO: 229 - RNA, 19 nt, Artificial Sequence
  Description of Artificial Sequence: Synthetic oligonucleotide
cugaaaaagccucucucag

SEQ ID NO: 230 - RNA, 19 nt, Artificial Sequence
  Description of Artificial Sequence: Synthetic oligonucleotide
ugaaaaagccucucucagc

SEQ ID NO: 231 - RNA, 19 nt, Artificial Sequence
  Description of Artificial Sequence: Synthetic oligonucleotide
gaaaaagccucucucagcu

SEQ ID NO: 232 - RNA, 19 nt, Artificial Sequence
  Description of Artificial Sequence: Synthetic oligonucleotide
aaaaagccucucucagcug

SEQ ID NO: 233 - RNA, 19 nt, Artificial Sequence
  Description of Artificial Sequence: Synthetic oligonucleotide
aaaagccucucucagcugu

SEQ ID NO: 234 - RNA, 19 nt, Artificial Sequence
  Description of Artificial Sequence: Synthetic oligonucleotide
aaagccucucucagcugug

SEQ ID NO: 235 - RNA, 19 nt, Artificial Sequence
  Description of Artificial Sequence: Synthetic oligonucleotide
aagccucucucagcuguga

SEQ ID NO: 236 - RNA, 19 nt, Artificial Sequence
  Description of Artificial Sequence: Synthetic oligonucleotide
agccucucucagcugugac

SEQ ID NO: 237 - RNA, 19 nt, Artificial Sequence
  Description of Artificial Sequence: Synthetic oligonucleotide
gccucucucagcugugacc

SEQ ID NO: 238 - RNA, 19 nt, Artificial Sequence
  Description of Artificial Sequence: Synthetic oligonucleotide
ccucucucagcugugaccu

SEQ ID NO: 239 - RNA, 19 nt, Artificial Sequence
  Description of Artificial Sequence: Synthetic oligonucleotide
cucucucagcugugaccug

SEQ ID NO: 240 - RNA, 19 nt, Artificial Sequence
  Description of Artificial Sequence: Synthetic oligonucleotide
ucucucagcugugaccugg

SEQ ID NO: 241 - RNA, 19 nt, Artificial Sequence
  Description of Artificial Sequence: Synthetic oligonucleotide
cucucagcugugaccuggc

SEQ ID NO: 242 - RNA, 19 nt, Artificial Sequence
  Description of Artificial Sequence: Synthetic oligonucleotide
ucucagcugugaccuggcu

SEQ ID NO: 243 - RNA, 19 nt, Artificial Sequence
  Description of Artificial Sequence: Synthetic oligonucleotide
cucagcugugaccuggcuc

SEQ ID NO: 244 - RNA, 19 nt, Artificial Sequence
  Description of Artificial Sequence: Synthetic oligonucleotide
ucagcugugaccuggcucu

SEQ ID NO: 245 - RNA, 19 nt, Artificial Sequence
  Description of Artificial Sequence: Synthetic oligonucleotide
cagcugugaccuggcucug

SEQ ID NO: 246 - RNA, 19 nt, Artificial Sequence
  Description of Artificial Sequence: Synthetic oligonucleotide
agcugugaccuggcucugc

SEQ ID NO: 247 - RNA, 19 nt, Artificial Sequence
  Description of Artificial Sequence: Synthetic oligonucleotide
gcugugaccuggcucugca

SEQ ID NO: 248 - RNA, 19 nt, Artificial Sequence
  Description of Artificial Sequence: Synthetic oligonucleotide
cugugaccuggcucugcau

SEQ ID NO: 249 - RNA, 19 nt, Artificial Sequence
  Description of Artificial Sequence: Synthetic oligonucleotide
ugugaccuggcucugcauu

SEQ ID NO: 250 - RNA, 19 nt, Artificial Sequence
  Description of Artificial Sequence: Synthetic oligonucleotide
gugaccuggcucugcauuu

SEQ ID NO: 251 - RNA, 19 nt, Artificial Sequence
  Description of Artificial Sequence: Synthetic oligonucleotide
ugaccuggcucugcauuuu

SEQ ID NO: 252 - RNA, 19 nt, Artificial Sequence
  Description of Artificial Sequence: Synthetic oligonucleotide
gaccuggcucugcauuuuc

SEQ ID NO: 253 - RNA, 19 nt, Artificial Sequence
  Description of Artificial Sequence: Synthetic oligonucleotide
accuggcucugcauuuuca

SEQ ID NO: 254 - RNA, 19 nt, Artificial Sequence
  Description of Artificial Sequence: Synthetic oligonucleotide
ccuggcucugcauuuucau

SEQ ID NO: 255 - RNA, 19 nt, Artificial Sequence
  Description of Artificial Sequence: Synthetic oligonucleotide
cuggcucugcauuuucauc

SEQ ID NO: 256 - RNA, 19 nt, Artificial Sequence
  Description of Artificial Sequence: Synthetic oligonucleotide
uggcucugcauuuucaucg

SEQ ID NO: 257 - RNA, 19 nt, Artificial Sequence
  Description of Artificial Sequence: Synthetic oligonucleotide
ggcucugcauuuucaucgu

SEQ ID NO: 258 - RNA, 19 nt, Artificial Sequence
  Description of Artificial Sequence: Synthetic oligonucleotide
gcucugcauuuucaucgug

SEQ ID NO: 259 - RNA, 19 nt, Artificial Sequence
  Description of Artificial Sequence: Synthetic oligonucleotide
cucugcauuuucaucgugg

SEQ ID NO: 260 - RNA, 19 nt, Artificial Sequence
  Description of Artificial Sequence: Synthetic oligonucleotide
ucugcauuuucaucguggc

SEQ ID NO: 261 - RNA, 19 nt, Artificial Sequence
  Description of Artificial Sequence: Synthetic oligonucleotide
cugcauuuucaucguggcc

SEQ ID NO: 262 - RNA, 19 nt, Artificial Sequence
  Description of Artificial Sequence: Synthetic oligonucleotide
ugcauuuucaucguggccu

SEQ ID NO: 263 - RNA, 19 nt, Artificial Sequence
  Description of Artificial Sequence: Synthetic oligonucleotide
gcauuuucaucguggccuu

SEQ ID NO: 264 - RNA, 19 nt, Artificial Sequence
  Description of Artificial Sequence: Synthetic oligonucleotide
cauuuucaucguggccuuu

SEQ ID NO: 265 - RNA, 19 nt, Artificial Sequence
  Description of Artificial Sequence: Synthetic oligonucleotide
auuuucaucguggccuuug

SEQ ID NO: 266 - RNA, 19 nt, Artificial Sequence
  Description of Artificial Sequence: Synthetic oligonucleotide
uuuucaucguggccuuugu

SEQ ID NO: 267 - RNA, 19 nt, Artificial Sequence
  Description of Artificial Sequence: Synthetic oligonucleotide
uuucaucguggccuuuguc

SEQ ID NO: 268 - RNA, 19 nt, Artificial Sequence
  Description of Artificial Sequence: Synthetic oligonucleotide
uucaucguggccuuuguca

SEQ ID NO: 269 - RNA, 19 nt, Artificial Sequence
  Description of Artificial Sequence: Synthetic oligonucleotide
ucaucguggccuuugucag

SEQ ID NO: 270 - RNA, 19 nt, Artificial Sequence
  Description of Artificial Sequence: Synthetic oligonucleotide
caucguggccuuugucagc

SEQ ID NO: 271 - RNA, 19 nt, Artificial Sequence
  Description of Artificial Sequence: Synthetic oligonucleotide
aucguggccuuugucagcc

SEQ ID NO: 272 - RNA, 19 nt, Artificial Sequence
  Description of Artificial Sequence: Synthetic oligonucleotide
ucguggccuuugucagcca

SEQ ID NO: 273 - RNA, 19 nt, Artificial Sequence
  Description of Artificial Sequence: Synthetic oligonucleotide
cguggccuuugucagccac

SEQ ID NO: 274 - RNA, 19 nt, Artificial Sequence
  Description of Artificial Sequence: Synthetic oligonucleotide
guggccuuugucagccacc

SEQ ID NO: 275 - RNA, 19 nt, Artificial Sequence
  Description of Artificial Sequence: Synthetic oligonucleotide
uggccuuugucagccaccc

SEQ ID NO: 276 - RNA, 19 nt, Artificial Sequence
  Description of Artificial Sequence: Synthetic oligonucleotide
ggccuuugucagccaccca

SEQ ID NO: 277 - RNA, 19 nt, Artificial Sequence
  Description of Artificial Sequence: Synthetic oligonucleotide
gccuuugucagccacccag

SEQ ID NO: 278 - RNA, 19 nt, Artificial Sequence
  Description of Artificial Sequence: Synthetic oligonucleotide
ccuuugucagccacccagc

SEQ ID NO: 279 - RNA, 19 nt, Artificial Sequence
  Description of Artificial Sequence: Synthetic oligonucleotide
cuuugucagccacccagcg

SEQ ID NO: 280 - RNA, 19 nt, Artificial Sequence
  Description of Artificial Sequence: Synthetic oligonucleotide
uuugucagccacccagcgu

SEQ ID NO: 281 - RNA, 19 nt, Artificial Sequence
  Description of Artificial Sequence: Synthetic oligonucleotide
uugucagccacccagcgug

SEQ ID NO: 282 - RNA, 19 nt, Artificial Sequence
  Description of Artificial Sequence: Synthetic oligonucleotide
ugucagccacccagcgugg

SEQ ID NO: 283 - RNA, 19 nt, Artificial Sequence
  Description of Artificial Sequence: Synthetic oligonucleotide
gucagccacccagcguggc

SEQ ID NO: 284 - RNA, 19 nt, Artificial Sequence
  Description of Artificial Sequence: Synthetic oligonucleotide
ucagccacccagcguggcu

SEQ ID NO: 285 - RNA, 19 nt, Artificial Sequence
  Description of Artificial Sequence: Synthetic oligonucleotide
cagccacccagcguggcug

SEQ ID NO: 286 - RNA, 19 nt, Artificial Sequence
  Description of Artificial Sequence: Synthetic oligonucleotide
agccacccagcguggcugc

SEQ ID NO: 287 - RNA, 19 nt, Artificial Sequence
  Description of Artificial Sequence: Synthetic oligonucleotide
gccacccagcguggcugca

SEQ ID NO: 288 - RNA, 19 nt, Artificial Sequence
  Description of Artificial Sequence: Synthetic oligonucleotide
ccacccagcguggcugcag

SEQ ID NO: 289 - RNA, 19 nt, Artificial Sequence
  Description of Artificial Sequence: Synthetic oligonucleotide
cacccagcguggcugcaga

SEQ ID NO: 290 - RNA, 19 nt, Artificial Sequence
  Description of Artificial Sequence: Synthetic oligonucleotide
acccagcguggcugcagaa

SEQ ID NO: 291 - RNA, 19 nt, Artificial Sequence
  Description of Artificial Sequence: Synthetic oligonucleotide
cccagcguggcugcagaag

SEQ ID NO: 292 - RNA, 19 nt, Artificial Sequence
  Description of Artificial Sequence: Synthetic oligonucleotide
ccagcguggcugcagaagc

SEQ ID NO: 293 - RNA, 19 nt, Artificial Sequence
  Description of Artificial Sequence: Synthetic oligonucleotide
cagcguggcugcagaagcu

SEQ ID NO: 294 - RNA, 19 nt, Artificial Sequence
  Description of Artificial Sequence: Synthetic oligonucleotide
agcguggcugcagaagcuc

SEQ ID NO: 295 - RNA, 19 nt, Artificial Sequence
  Description of Artificial Sequence: Synthetic oligonucleotide
gcguggcugcagaagcucu

SEQ ID NO: 296 - RNA, 19 nt, Artificial Sequence
  Description of Artificial Sequence: Synthetic oligonucleotide
cguggcugcagaagcucuc

SEQ ID NO: 297 - RNA, 19 nt, Artificial Sequence
  Description of Artificial Sequence: Synthetic oligonucleotide
guggcugcagaagcucucu

SEQ ID NO: 298 - RNA, 19 nt, Artificial Sequence
  Description of Artificial Sequence: Synthetic oligonucleotide
uggcugcagaagcucucua

SEQ ID NO: 299 - RNA, 19 nt, Artificial Sequence
  Description of Artificial Sequence: Synthetic oligonucleotide
ggcugcagaagcucucuaa

SEQ ID NO: 300 - RNA, 19 nt, Artificial Sequence
  Description of Artificial Sequence: Synthetic oligonucleotide
gcugcagaagcucucuaag

SEQ ID NO: 301 - RNA, 19 nt, Artificial Sequence
  Description of Artificial Sequence: Synthetic oligonucleotide
cugcagaagcucucuaagc

SEQ ID NO: 302 - RNA, 19 nt, Artificial Sequence
  Description of Artificial Sequence: Synthetic oligonucleotide
ugcagaagcucucuaagca

SEQ ID NO: 303 - RNA, 19 nt, Artificial Sequence
  Description of Artificial Sequence: Synthetic oligonucleotide
gcagaagcucucuaagcac

SEQ ID NO: 304 - RNA, 19 nt, Artificial Sequence
  Description of Artificial Sequence: Synthetic oligonucleotide
cagaagcucucuaagcaca

SEQ ID NO: 305 - RNA, 19 nt, Artificial Sequence
  Description of Artificial Sequence: Synthetic oligonucleotide
agaagcucucuaagcacaa

SEQ ID NO: 306 - RNA, 19 nt, Artificial Sequence
  Description of Artificial Sequence: Synthetic oligonucleotide
gaagcucucuaagcacaag

SEQ ID NO: 307 - RNA, 19 nt, Artificial Sequence
  Description of Artificial Sequence: Synthetic oligonucleotide
aagcucucuaagcacaaga

SEQ ID NO: 308 - RNA, 19 nt, Artificial Sequence
  Description of Artificial Sequence: Synthetic oligonucleotide
agcucucuaagcacaagac

SEQ ID NO: 309 - RNA, 19 nt, Artificial Sequence
  Description of Artificial Sequence: Synthetic oligonucleotide
gcucucuaagcacaagaca

SEQ ID NO: 310 - RNA, 19 nt, Artificial Sequence
  Description of Artificial Sequence: Synthetic oligonucleotide
cucucuaagcacaagacac

SEQ ID NO: 311 - RNA, 19 nt, Artificial Sequence
  Description of Artificial Sequence: Synthetic oligonucleotide
ucucuaagcacaagacacc

SEQ ID NO: 312 - RNA, 19 nt, Artificial Sequence
  Description of Artificial Sequence: Synthetic oligonucleotide
cucuaagcacaagacacca

SEQ ID NO: 313 - RNA, 19 nt, Artificial Sequence
  Description of Artificial Sequence: Synthetic oligonucleotide
ucuaagcacaagacaccag

SEQ ID NO: 314 - RNA, 19 nt, Artificial Sequence
  Description of Artificial Sequence: Synthetic oligonucleotide
cuaagcacaagacaccagc

SEQ ID NO: 315 - RNA, 19 nt, Artificial Sequence
  Description of Artificial Sequence: Synthetic oligonucleotide
uaagcacaagacaccagca

SEQ ID NO: 316 - RNA, 19 nt, Artificial Sequence
  Description of Artificial Sequence: Synthetic oligonucleotide
aagcacaagacaccagcac

SEQ ID NO: 317 - RNA, 19 nt, Artificial Sequence
  Description of Artificial Sequence: Synthetic oligonucleotide
agcacaagacaccagcaca

SEQ ID NO: 318 - RNA, 19 nt, Artificial Sequence
  Description of Artificial Sequence: Synthetic oligonucleotide
gcacaagacaccagcacag

SEQ ID NO: 319 - RNA, 19 nt, Artificial Sequence
  Description of Artificial Sequence: Synthetic oligonucleotide
cacaagacaccagcacagc

SEQ ID NO: 320 - RNA, 19 nt, Artificial Sequence
  Description of Artificial Sequence: Synthetic oligonucleotide
acaagacaccagcacagcc

SEQ ID NO: 321 - RNA, 19 nt, Artificial Sequence
  Description of Artificial Sequence: Synthetic oligonucleotide
caagacaccagcacagcca

SEQ ID NO: 322 - RNA, 19 nt, Artificial Sequence
  Description of Artificial Sequence: Synthetic oligonucleotide
aagacaccagcacagccac

SEQ ID NO: 323 - RNA, 19 nt, Artificial Sequence
  Description of Artificial Sequence: Synthetic oligonucleotide
agacaccagcacagccaca

SEQ ID NO: 324 - RNA, 19 nt, Artificial Sequence
  Description of Artificial Sequence: Synthetic oligonucleotide
gacaccagcacagccacag

SEQ ID NO: 325 - RNA, 19 nt, Artificial Sequence
  Description of Artificial Sequence: Synthetic oligonucleotide
acaccagcacagccacagc

SEQ ID NO: 326 - RNA, 19 nt, Artificial Sequence
  Description of Artificial Sequence: Synthetic oligonucleotide
caccagcacagccacagcu

SEQ ID NO: 327 - RNA, 19 nt, Artificial Sequence
  Description of Artificial Sequence: Synthetic oligonucleotide
accagcacagccacagcuc

SEQ ID NO: 328 - RNA, 19 nt, Artificial Sequence
  Description of Artificial Sequence: Synthetic oligonucleotide
ccagcacagccacagcuca

SEQ ID NO: 329 - RNA, 19 nt, Artificial Sequence
  Description of Artificial Sequence: Synthetic oligonucleotide
cagcacagccacagcucaa

SEQ ID NO: 330 - RNA, 19 nt, Artificial Sequence
  Description of Artificial Sequence: Synthetic oligonucleotide
agcacagccacagcucaaa

SEQ ID NO: 331 - RNA, 19 nt, Artificial Sequence
  Description of Artificial Sequence: Synthetic oligonucleotide
gcacagccacagcucaaag

SEQ ID NO: 332 - RNA, 19 nt, Artificial Sequence
  Description of Artificial Sequence: Synthetic oligonucleotide
cacagccacagcucaaagc

SEQ ID NO: 333 - RNA, 19 nt, Artificial Sequence
  Description of Artificial Sequence: Synthetic oligonucleotide
acagccacagcucaaagcg

SEQ ID NO: 334 - RNA, 19 nt, Artificial Sequence
  Description of Artificial Sequence: Synthetic oligonucleotide
cagccacagcucaaagcgg

SEQ ID NO: 335 - RNA, 19 nt, Artificial Sequence
  Description of Artificial Sequence: Synthetic oligonucleotide
agccacagcucaaagcggc

SEQ ID NO: 336 - RNA, 19 nt, Artificial Sequence
  Description of Artificial Sequence: Synthetic oligonucleotide
gccacagcucaaagcggcc

SEQ ID NO: 337 - RNA, 19 nt, Artificial Sequence
  Description of Artificial Sequence: Synthetic oligonucleotide
ccacagcucaaagcggcca

SEQ ID NO: 338 - RNA, 19 nt, Artificial Sequence
  Description of Artificial Sequence: Synthetic oligonucleotide
cacagcucaaagcggccaa

SEQ ID NO: 339 - RNA, 19 nt, Artificial Sequence
  Description of Artificial Sequence: Synthetic oligonucleotide
acagcucaaagcggccaac

SEQ ID NO: 340 - RNA, 19 nt, Artificial Sequence
  Description of Artificial Sequence: Synthetic oligonucleotide
cagcucaaagcggccaacu

SEQ ID NO: 341 - RNA, 19 nt, Artificial Sequence
  Description of Artificial Sequence: Synthetic oligonucleotide
agcucaaagcggccaacug

SEQ ID NO: 342 - RNA, 19 nt, Artificial Sequence
  Description of Artificial Sequence: Synthetic oligonucleotide
gcucaaagcggccaacugc

SEQ ID NO: 343 - RNA, 19 nt, Artificial Sequence
  Description of Artificial Sequence: Synthetic oligonucleotide
cucaaagcggccaacugcu

SEQ ID NO: 344 - RNA, 19 nt, Artificial Sequence
  Description of Artificial Sequence: Synthetic oligonucleotide
ucaaagcggccaacugcug

SEQ ID NO: 345 - RNA, 19 nt, Artificial Sequence
  Description of Artificial Sequence: Synthetic oligonucleotide
caaagcggccaacugcugu

SEQ ID NO: 346 - RNA, 19 nt, Artificial Sequence
  Description of Artificial Sequence: Synthetic oligonucleotide
aaagcggccaacugcugug

SEQ ID NO: 347 - RNA, 19 nt, Artificial Sequence
  Description of Artificial Sequence: Synthetic oligonucleotide
aagcggccaacugcuguga

SEQ ID NO: 348 - RNA, 19 nt, Artificial Sequence
  Description of Artificial Sequence: Synthetic oligonucleotide
agcggccaacugcugugag

SEQ ID NO: 349 - RNA, 19 nt, Artificial Sequence
  Description of Artificial Sequence: Synthetic oligonucleotide
gcggccaacugcugugagg

SEQ ID NO: 350 - RNA, 19 nt, Artificial Sequence
  Description of Artificial Sequence: Synthetic oligonucleotide
cggccaacugcugugagga

SEQ ID NO: 351 - RNA, 19 nt, Artificial Sequence
  Description of Artificial Sequence: Synthetic oligonucleotide
ggccaacugcugugaggag

SEQ ID NO: 352 - RNA, 19 nt, Artificial Sequence
  Description of Artificial Sequence: Synthetic oligonucleotide
gccaacugcugugaggagg

SEQ ID NO: 353 - RNA, 19 nt, Artificial Sequence
  Description of Artificial Sequence: Synthetic oligonucleotide
ccaacugcugugaggaggu

SEQ ID NO: 354 - RNA, 19 nt, Artificial Sequence
  Description of Artificial Sequence: Synthetic oligonucleotide
caacugcugugaggaggug

SEQ ID NO: 355 - RNA, 19 nt, Artificial Sequence
  Description of Artificial Sequence: Synthetic oligonucleotide
aacugcugugaggagguga

SEQ ID NO: 356 - RNA, 19 nt, Artificial Sequence
  Description of Artificial Sequence: Synthetic oligonucleotide
acugcugugaggaggugaa

SEQ ID NO: 357 - RNA, 19 nt, Artificial Sequence
  Description of Artificial Sequence: Synthetic oligonucleotide
cugcugugaggaggugaag

SEQ ID NO: 358 - RNA, 19 nt, Artificial Sequence
  Description of Artificial Sequence: Synthetic oligonucleotide
ugcugugaggaggugaagg

SEQ ID NO: 359 - RNA, 19 nt, Artificial Sequence
  Description of Artificial Sequence: Synthetic oligonucleotide
gcugugaggaggugaagga

SEQ ID NO: 360 - RNA, 19 nt, Artificial Sequence
  Description of Artificial Sequence: Synthetic oligonucleotide
cugugaggaggugaaggag

SEQ ID NO: 361 - RNA, 19 nt, Artificial Sequence
  Description of Artificial Sequence: Synthetic oligonucleotide
ugugaggaggugaaggagc

SEQ ID NO: 362 - RNA, 19 nt, Artificial Sequence
  Description of Artificial Sequence: Synthetic oligonucleotide
gugaggaggugaaggagcu

SEQ ID NO: 363 - RNA, 19 nt, Artificial Sequence
  Description of Artificial Sequence: Synthetic oligonucleotide
ugaggaggugaaggagcuc

SEQ ID NO: 364 - RNA, 19 nt, Artificial Sequence
  Description of Artificial Sequence: Synthetic oligonucleotide
gaggaggugaaggagcuca

SEQ ID NO: 365 - RNA, 19 nt, Artificial Sequence
  Description of Artificial Sequence: Synthetic oligonucleotide
aggaggugaaggagcucaa

SEQ ID NO: 366 - RNA, 19 nt, Artificial Sequence
  Description of Artificial Sequence: Synthetic oligonucleotide
ggaggugaaggagcucaag

SEQ ID NO: 367 - RNA, 19 nt, Artificial Sequence
  Description of Artificial Sequence: Synthetic oligonucleotide
gaggugaaggagcucaagg

SEQ ID NO: 368 - RNA, 19 nt, Artificial Sequence
  Description of Artificial Sequence: Synthetic oligonucleotide
aggugaaggagcucaaggc

SEQ ID NO: 369 - RNA, 19 nt, Artificial Sequence
  Description of Artificial Sequence: Synthetic oligonucleotide
ggugaaggagcucaaggcc

SEQ ID NO: 370 - RNA, 19 nt, Artificial Sequence
  Description of Artificial Sequence: Synthetic oligonucleotide
gugaaggagcucaaggccc

SEQ ID NO: 371 - RNA, 19 nt, Artificial Sequence
  Description of Artificial Sequence: Synthetic oligonucleotide
ugaaggagcucaaggccca

SEQ ID NO: 372 - RNA, 19 nt, Artificial Sequence
  Description of Artificial Sequence: Synthetic oligonucleotide
gaaggagcucaaggcccaa

SEQ ID NO: 373 - RNA, 19 nt, Artificial Sequence
  Description of Artificial Sequence: Synthetic oligonucleotide
aaggagcucaaggcccaag

SEQ ID NO: 374 - RNA, 19 nt, Artificial Sequence
  Description of Artificial Sequence: Synthetic oligonucleotide
aggagcucaaggcccaagu

SEQ ID NO: 375 - RNA, 19 nt, Artificial Sequence
  Description of Artificial Sequence: Synthetic oligonucleotide
ggagcucaaggcccaaguu

SEQ ID NO: 376 - RNA, 19 nt, Artificial Sequence
  Description of Artificial Sequence: Synthetic oligonucleotide
gagcucaaggcccaaguug

SEQ ID NO: 377 - RNA, 19 nt, Artificial Sequence
  Description of Artificial Sequence: Synthetic oligonucleotide
agcucaaggcccaaguugc

SEQ ID NO: 378 - RNA, 19 nt, Artificial Sequence
  Description of Artificial Sequence: Synthetic oligonucleotide
gcucaaggcccaaguugcc

SEQ ID NO: 379 - RNA, 19 nt, Artificial Sequence
  Description of Artificial Sequence: Synthetic oligonucleotide
cucaaggcccaaguugcca

SEQ ID NO: 380 - RNA, 19 nt, Artificial Sequence
  Description of Artificial Sequence: Synthetic oligonucleotide
ucaaggcccaaguugccaa

SEQ ID NO: 381 - RNA, 19 nt, Artificial Sequence
  Description of Artificial Sequence: Synthetic oligonucleotide
caaggcccaaguugccaac

SEQ ID NO: 382 - RNA, 19 nt, Artificial Sequence
  Description of Artificial Sequence: Synthetic oligonucleotide
aaggcccaaguugccaacc

SEQ ID NO: 383 - RNA, 19 nt, Artificial Sequence
  Description of Artificial Sequence: Synthetic oligonucleotide
aggcccaaguugccaaccu

SEQ ID NO: 384 - RNA, 19 nt, Artificial Sequence
  Description of Artificial Sequence: Synthetic oligonucleotide
ggcccaaguugccaaccuu

SEQ ID NO: 385 - RNA, 19 nt, Artificial Sequence
  Description of Artificial Sequence: Synthetic oligonucleotide
gcccaaguugccaaccuua

SEQ ID NO: 386 - RNA, 19 nt, Artificial Sequence
  Description of Artificial Sequence: Synthetic oligonucleotide
cccaaguugccaaccuuag

SEQ ID NO: 387 - RNA, 19 nt, Artificial Sequence
  Description of Artificial Sequence: Synthetic oligonucleotide
ccaaguugccaaccuuagc

SEQ ID NO: 388 - RNA, 19 nt, Artificial Sequence
  Description of Artificial Sequence: Synthetic oligonucleotide
caaguugccaaccuuagca

SEQ ID NO: 389 - RNA, 19 nt, Artificial Sequence
  Description of Artificial Sequence: Synthetic oligonucleotide
aaguugccaaccuuagcag

SEQ ID NO: 390 - RNA, 19 nt, Artificial Sequence
  Description of Artificial Sequence: Synthetic oligonucleotide
aguugccaaccuuagcagc

SEQ ID NO: 391 - RNA, 19 nt, Artificial Sequence
  Description of Artificial Sequence: Synthetic oligonucleotide
guugccaaccuuagcagcc

SEQ ID NO: 392 - RNA, 19 nt, Artificial Sequence
  Description of Artificial Sequence: Synthetic oligonucleotide
uugccaaccuuagcagccu

SEQ ID NO: 393 - RNA, 19 nt, Artificial Sequence
  Description of Artificial Sequence: Synthetic oligonucleotide
ugccaaccuuagcagccug

SEQ ID NO: 394 - RNA, 19 nt, Artificial Sequence
  Description of Artificial Sequence: Synthetic oligonucleotide
gccaaccuuagcagccugc

SEQ ID NO: 395 - RNA, 19 nt, Artificial Sequence
  Description of Artificial Sequence: Synthetic oligonucleotide
ccaaccuuagcagccugcu

SEQ ID NO: 396 - RNA, 19 nt, Artificial Sequence
  Description of Artificial Sequence: Synthetic oligonucleotide
caaccuuagcagccugcug

SEQ ID NO: 397 - RNA, 19 nt, Artificial Sequence
  Description of Artificial Sequence: Synthetic oligonucleotide
aaccuuagcagccugcuga

SEQ ID NO: 398 - RNA, 19 nt, Artificial Sequence
  Description of Artificial Sequence: Synthetic oligonucleotide
accuuagcagccugcugag

SEQ ID NO: 399 - RNA, 19 nt, Artificial Sequence
  Description of Artificial Sequence: Synthetic oligonucleotide
ccuuagcagccugcugagu

SEQ ID NO: 400 - RNA, 19 nt, Artificial Sequence
  Description of Artificial Sequence: Synthetic oligonucleotide
cuuagcagccugcugagug

SEQ ID NO: 401 - RNA, 19 nt, Artificial Sequence
  Description of Artificial Sequence: Synthetic oligonucleotide
uuagcagccugcugaguga

SEQ ID NO: 402 - RNA, 19 nt, Artificial Sequence
  Description of Artificial Sequence: Synthetic oligonucleotide
uagcagccugcugagugaa

SEQ ID NO: 403 - RNA, 19 nt, Artificial Sequence
  Description of Artificial Sequence: Synthetic oligonucleotide
agcagccugcugagugaac

SEQ ID NO: 404 - RNA, 19 nt, Artificial Sequence
  Description of Artificial Sequence: Synthetic oligonucleotide
gcagccugcugagugaacu

SEQ ID NO: 405 - RNA, 19 nt, Artificial Sequence
  Description of Artificial Sequence: Synthetic oligonucleotide
cagccugcugagugaacug

SEQ ID NO: 406 - RNA, 19 nt, Artificial Sequence
  Description of Artificial Sequence: Synthetic oligonucleotide
agccugcugagugaacuga

SEQ ID NO: 407 - RNA, 19 nt, Artificial Sequence
  Description of Artificial Sequence: Synthetic oligonucleotide
gccugcugagugaacugaa

SEQ ID NO: 408 - RNA, 19 nt, Artificial Sequence
  Description of Artificial Sequence: Synthetic oligonucleotide
ccugcugagugaacugaac

SEQ ID NO: 409 - RNA, 19 nt, Artificial Sequence
  Description of Artificial Sequence: Synthetic oligonucleotide
cugcugagugaacugaaca

SEQ ID NO: 410 - RNA, 19 nt, Artificial Sequence
  Description of Artificial Sequence: Synthetic oligonucleotide
ugcugagugaacugaacaa

SEQ ID NO: 411 - RNA, 19 nt, Artificial Sequence
  Description of Artificial Sequence: Synthetic oligonucleotide
gcugagugaacugaacaag

SEQ ID NO: 412 - RNA, 19 nt, Artificial Sequence
  Description of Artificial Sequence: Synthetic oligonucleotide
cugagugaacugaacaaga

SEQ ID NO: 413 - RNA, 19 nt, Artificial Sequence
  Description of Artificial Sequence: Synthetic oligonucleotide
ugagugaacugaacaagaa

SEQ ID NO: 414 - RNA, 19 nt, Artificial Sequence
  Description of Artificial Sequence: Synthetic oligonucleotide
gagugaacugaacaagaag

SEQ ID NO: 415 - RNA, 19 nt, Artificial Sequence
  Description of Artificial Sequence: Synthetic oligonucleotide
agugaacugaacaagaagc

SEQ ID NO: 416 - RNA, 19 nt, Artificial Sequence
  Description of Artificial Sequence: Synthetic oligonucleotide
gugaacugaacaagaagca

SEQ ID NO: 417 - RNA, 19 nt, Artificial Sequence
  Description of Artificial Sequence: Synthetic oligonucleotide
ugaacugaacaagaagcag

SEQ ID NO: 418 - RNA, 19 nt, Artificial Sequence
  Description of Artificial Sequence: Synthetic oligonucleotide
gaacugaacaagaagcagg

SEQ ID NO: 419 - RNA, 19 nt, Artificial Sequence
  Description of Artificial Sequence: Synthetic oligonucleotide
aacugaacaagaagcagga

SEQ ID NO: 420 - RNA, 19 nt, Artificial Sequence
  Description of Artificial Sequence: Synthetic oligonucleotide
acugaacaagaagcaggag

SEQ ID NO: 421 - RNA, 19 nt, Artificial Sequence
  Description of Artificial Sequence: Synthetic oligonucleotide
cugaacaagaagcaggaga

SEQ ID NO: 422 - RNA, 19 nt, Artificial Sequence
  Description of Artificial Sequence: Synthetic oligonucleotide
ugaacaagaagcaggagag

SEQ ID NO: 423 - RNA, 19 nt, Artificial Sequence
  Description of Artificial Sequence: Synthetic oligonucleotide
gaacaagaagcaggagagg

SEQ ID NO: 424 - RNA, 19 nt, Artificial Sequence
  Description of Artificial Sequence: Synthetic oligonucleotide
aacaagaagcaggagaggg

SEQ ID NO: 425 - RNA, 19 nt, Artificial Sequence
  Description of Artificial Sequence: Synthetic oligonucleotide
acaagaagcaggagaggga

SEQ ID NO: 426 - RNA, 19 nt, Artificial Sequence
  Description of Artificial Sequence: Synthetic oligonucleotide
caagaagcaggagagggac

SEQ ID NO: 427 - RNA, 19 nt, Artificial Sequence
  Description of Artificial Sequence: Synthetic oligonucleotide
aagaagcaggagagggacu

SEQ ID NO: 428 - RNA, 19 nt, Artificial Sequence
  Description of Artificial Sequence: Synthetic oligonucleotide
agaagcaggagagggacug

SEQ ID NO: 429 - RNA, 19 nt, Artificial Sequence
  Description of Artificial Sequence: Synthetic oligonucleotide
gaagcaggagagggacugg

SEQ ID NO: 430 - RNA, 19 nt, Artificial Sequence
  Description of Artificial Sequence: Synthetic oligonucleotide
aagcaggagagggacuggg

SEQ ID NO: 431 - RNA, 19 nt, Artificial Sequence
  Description of Artificial Sequence: Synthetic oligonucleotide
agcaggagagggacugggu

SEQ ID NO: 432 - RNA, 19 nt, Artificial Sequence
  Description of Artificial Sequence: Synthetic oligonucleotide
gcaggagagggacuggguc

SEQ ID NO: 433 - RNA, 19 nt, Artificial Sequence
  Description of Artificial Sequence: Synthetic oligonucleotide
caggagagggacuggguca

SEQ ID NO: 434 - RNA, 19 nt, Artificial Sequence
  Description of Artificial Sequence: Synthetic oligonucleotide
aggagagggacugggucag

SEQ ID NO: 435 - RNA, 19 nt, Artificial Sequence
  Description of Artificial Sequence: Synthetic oligonucleotide
ggagagggacugggucagc

SEQ ID NO: 436 - RNA, 19 nt, Artificial Sequence
  Description of Artificial Sequence: Synthetic oligonucleotide
gagagggacugggucagcg

SEQ ID NO: 437 - RNA, 19 nt, Artificial Sequence
  Description of Artificial Sequence: Synthetic oligonucleotide
agagggacugggucagcgu

SEQ ID NO: 438 - RNA, 19 nt, Artificial Sequence
  Description of Artificial Sequence: Synthetic oligonucleotide
gagggacugggucagcgug

SEQ ID NO: 439 - RNA, 19 nt, Artificial Sequence
  Description of Artificial Sequence: Synthetic oligonucleotide
agggacugggucagcgugg

SEQ ID NO: 440 - RNA, 19 nt, Artificial Sequence
  Description of Artificial Sequence: Synthetic oligonucleotide
gggacugggucagcguggu

SEQ ID NO: 441 - RNA, 19 nt, Artificial Sequence
  Description of Artificial Sequence: Synthetic oligonucleotide
ggacugggucagcgugguc

SEQ ID NO: 442 - RNA, 19 nt, Artificial Sequence
  Description of Artificial Sequence: Synthetic oligonucleotide
gacugggucagcgugguca

SEQ ID NO: 443 - RNA, 19 nt, Artificial Sequence
  Description of Artificial Sequence: Synthetic oligonucleotide
acugggucagcguggucau

SEQ ID NO: 444 - RNA, 19 nt, Artificial Sequence
  Description of Artificial Sequence: Synthetic oligonucleotide
cugggucagcguggucaug

SEQ ID NO: 445 - RNA, 19 nt, Artificial Sequence
  Description of Artificial Sequence: Synthetic oligonucleotide
ugggucagcguggucaugc

SEQ ID NO: 446 - RNA, 19 nt, Artificial Sequence
  Description of Artificial Sequence: Synthetic oligonucleotide
gggucagcguggucaugca

SEQ ID NO: 447 - RNA, 19 nt, Artificial Sequence
  Description of Artificial Sequence: Synthetic oligonucleotide
ggucagcguggucaugcag

SEQ ID NO: 448 - RNA, 19 nt, Artificial Sequence
  Description of Artificial Sequence: Synthetic oligonucleotide
gucagcguggucaugcagg

SEQ ID NO: 449 - RNA, 19 nt, Artificial Sequence
  Description of Artificial Sequence: Synthetic oligonucleotide
ucagcguggucaugcaggu

SEQ ID NO: 450 - RNA, 19 nt, Artificial Sequence
  Description of Artificial Sequence: Synthetic oligonucleotide
cagcguggucaugcaggug

SEQ ID NO: 451 - RNA, 19 nt, Artificial Sequence
  Description of Artificial Sequence: Synthetic oligonucleotide
agcguggucaugcagguga

SEQ ID NO: 452 - RNA, 19 nt, Artificial Sequence
  Description of Artificial Sequence: Synthetic oligonucleotide
gcguggucaugcaggugau

SEQ ID NO: 453 - RNA, 19 nt, Artificial Sequence
  Description of Artificial Sequence: Synthetic oligonucleotide
cguggucaugcaggugaug

SEQ ID NO: 454 - RNA, 19 nt, Artificial Sequence
  Description of Artificial Sequence: Synthetic oligonucleotide
guggucaugcaggugaugg

SEQ ID NO: 455 - RNA, 19 nt, Artificial Sequence
  Description of Artificial Sequence: Synthetic oligonucleotide
uggucaugcaggugaugga

SEQ ID NO: 456 - RNA, 19 nt, Artificial Sequence
  Description of Artificial Sequence: Synthetic oligonucleotide
ggucaugcaggugauggag

SEQ ID NO: 457 - RNA, 19 nt, Artificial Sequence
  Description of Artificial Sequence: Synthetic oligonucleotide
gucaugcaggugauggagc

SEQ ID NO: 458 - RNA, 19 nt, Artificial Sequence
  Description of Artificial Sequence: Synthetic oligonucleotide
ucaugcaggugauggagcu

SEQ ID NO: 459 - RNA, 19 nt, Artificial Sequence
  Description of Artificial Sequence: Synthetic oligonucleotide
caugcaggugauggagcug

SEQ ID NO: 460 - RNA, 19 nt, Artificial Sequence
  Description of Artificial Sequence: Synthetic oligonucleotide
augcaggugauggagcugg

SEQ ID NO: 461 - RNA, 19 nt, Artificial Sequence
  Description of Artificial Sequence: Synthetic oligonucleotide
ugcaggugauggagcugga

SEQ ID NO: 462 - RNA, 19 nt, Artificial Sequence
  Description of Artificial Sequence: Synthetic oligonucleotide
gcaggugauggagcuggag

SEQ ID NO: 463 - RNA, 19 nt, Artificial Sequence
  Description of Artificial Sequence: Synthetic oligonucleotide
caggugauggagcuggaga

SEQ ID NO: 464 - RNA, 19 nt, Artificial Sequence
  Description of Artificial Sequence: Synthetic oligonucleotide
aggugauggagcuggagag

SEQ ID NO: 465 - RNA, 19 nt, Artificial Sequence
  Description of Artificial Sequence: Synthetic oligonucleotide
ggugauggagcuggagagc

SEQ ID NO: 466 - RNA, 19 nt, Artificial Sequence
  Description of Artificial Sequence: Synthetic oligonucleotide
gugauggagcuggagagca

SEQ ID NO: 467 - RNA, 19 nt, Artificial Sequence
  Description of Artificial Sequence: Synthetic oligonucleotide
ugauggagcuggagagcaa

SEQ ID NO: 468 - RNA, 19 nt, Artificial Sequence
  Description of Artificial Sequence: Synthetic oligonucleotide
gauggagcuggagagcaac

SEQ ID NO: 469 - RNA, 19 nt, Artificial Sequence
  Description of Artificial Sequence: Synthetic oligonucleotide
auggagcuggagagcaaca

SEQ ID NO: 470 - RNA, 19 nt, Artificial Sequence
  Description of Artificial Sequence: Synthetic oligonucleotide
uggagcuggagagcaacag

SEQ ID NO: 471 - RNA, 19 nt, Artificial Sequence
  Description of Artificial Sequence: Synthetic oligonucleotide
ggagcuggagagcaacagc

SEQ ID NO: 472 - RNA, 19 nt, Artificial Sequence
  Description of Artificial Sequence: Synthetic oligonucleotide
gagcuggagagcaacagca

SEQ ID NO: 473 - RNA, 19 nt, Artificial Sequence
  Description of Artificial Sequence: Synthetic oligonucleotide
agcuggagagcaacagcaa

SEQ ID NO: 474 - RNA, 19 nt, Artificial Sequence
  Description of Artificial Sequence: Synthetic oligonucleotide
gcuggagagcaacagcaag

SEQ ID NO: 475 - RNA, 19 nt, Artificial Sequence
  Description of Artificial Sequence: Synthetic oligonucleotide
cuggagagcaacagcaagc

SEQ ID NO: 476 - RNA, 19 nt, Artificial Sequence
  Description of Artificial Sequence: Synthetic oligonucleotide
uggagagcaacagcaagcg

SEQ ID NO: 477 - RNA, 19 nt, Artificial Sequence
  Description of Artificial Sequence: Synthetic oligonucleotide
ggagagcaacagcaagcgc

SEQ ID NO: 478 - RNA, 19 nt, Artificial Sequence
  Description of Artificial Sequence: Synthetic oligonucleotide
gagagcaacagcaagcgca

SEQ ID NO: 479 - RNA, 19 nt, Artificial Sequence
  Description of Artificial Sequence: Synthetic oligonucleotide
agagcaacagcaagcgcau

SEQ ID NO: 480 - RNA, 19 nt, Artificial Sequence
  Description of Artificial Sequence: Synthetic oligonucleotide
gagcaacagcaagcgcaug

SEQ ID NO: 481 - RNA, 19 nt, Artificial Sequence
  Description of Artificial Sequence: Synthetic oligonucleotide
agcaacagcaagcgcaugg

SEQ ID NO: 482 - RNA, 19 nt, Artificial Sequence
  Description of Artificial Sequence: Synthetic oligonucleotide
gcaacagcaagcgcaugga

SEQ ID NO: 483 - RNA, 19 nt, Artificial Sequence
  Description of Artificial Sequence: Synthetic oligonucleotide
caacagcaagcgcauggag

SEQ ID NO: 484 - RNA, 19 nt, Artificial Sequence
  Description of Artificial Sequence: Synthetic oligonucleotide
aacagcaagcgcauggagu

SEQ ID NO: 485 - RNA, 19 nt, Artificial Sequence
  Description of Artificial Sequence: Synthetic oligonucleotide
acagcaagcgcauggaguc

SEQ ID NO: 486 - RNA, 19 nt, Artificial Sequence
  Description of Artificial Sequence: Synthetic oligonucleotide
cagcaagcgcauggagucg

SEQ ID NO: 487 - RNA, 19 nt, Artificial Sequence
  Description of Artificial Sequence: Synthetic oligonucleotide
agcaagcgcauggagucgc

SEQ ID NO: 488 - RNA, 19 nt, Artificial Sequence
  Description of Artificial Sequence: Synthetic oligonucleotide
gcaagcgcauggagucgcg

SEQ ID NO: 489 - RNA, 19 nt, Artificial Sequence
  Description of Artificial Sequence: Synthetic oligonucleotide
caagcgcauggagucgcgg

SEQ ID NO: 490 - RNA, 19 nt, Artificial Sequence
  Description of Artificial Sequence: Synthetic oligonucleotide
aagcgcauggagucgcggc

SEQ ID NO: 491 - RNA, 19 nt, Artificial Sequence
  Description of Artificial Sequence: Synthetic oligonucleotide
agcgcauggagucgcggcu

SEQ ID NO: 492 - RNA, 19 nt, Artificial Sequence
  Description of Artificial Sequence: Synthetic oligonucleotide
gcgcauggagucgcggcuc

SEQ ID NO: 493 - RNA, 19 nt, Artificial Sequence
  Description of Artificial Sequence: Synthetic oligonucleotide
cgcauggagucgcggcuca

SEQ ID NO: 494 - RNA, 19 nt, Artificial Sequence
  Description of Artificial Sequence: Synthetic oligonucleotide
gcauggagucgcggcucac

SEQ ID NO: 495 - RNA, 19 nt, Artificial Sequence
  Description of Artificial Sequence: Synthetic oligonucleotide
cauggagucgcggcucaca

SEQ ID NO: 496 - RNA, 19 nt, Artificial Sequence
  Description of Artificial Sequence: Synthetic oligonucleotide
auggagucgcggcucacag

SEQ ID NO: 497 - RNA, 19 nt, Artificial Sequence
  Description of Artificial Sequence: Synthetic oligonucleotide
uggagucgcggcucacaga

SEQ ID NO: 498 - RNA, 19 nt, Artificial Sequence
  Description of Artificial Sequence: Synthetic oligonucleotide
ggagucgcggcucacagau

SEQ ID NO: 499 - RNA, 19 nt, Artificial Sequence
  Description of Artificial Sequence: Synthetic oligonucleotide
gagucgcggcucacagaug

SEQ ID NO: 500 - RNA, 19 nt, Artificial Sequence
  Description of Artificial Sequence: Synthetic oligonucleotide
agucgcggcucacagaugc

SEQ ID NO: 501 - RNA, 19 nt, Artificial Sequence
  Description of Artificial Sequence: Synthetic oligonucleotide
gucgcggcucacagaugcu

SEQ ID NO: 502 - RNA, 19 nt, Artificial Sequence
  Description of Artificial Sequence: Synthetic oligonucleotide
ucgcggcucacagaugcug

SEQ ID NO: 503 - RNA, 19 nt, Artificial Sequence
  Description of Artificial Sequence: Synthetic oligonucleotide
cgcggcucacagaugcuga

SEQ ID NO: 504 - RNA, 19 nt, Artificial Sequence
  Description of Artificial Sequence: Synthetic oligonucleotide
gcggcucacagaugcugag

SEQ ID NO: 505 - RNA, 19 nt, Artificial Sequence
  Description of Artificial Sequence: Synthetic oligonucleotide
cggcucacagaugcugaga

SEQ ID NO: 506 - RNA, 19 nt, Artificial Sequence
  Description of Artificial Sequence: Synthetic oligonucleotide
ggcucacagaugcugagag

SEQ ID NO: 507 - RNA, 19 nt, Artificial Sequence
  Description of Artificial Sequence: Synthetic oligonucleotide
gcucacagaugcugagagc

SEQ ID NO: 508 - RNA, 19 nt, Artificial Sequence
  Description of Artificial Sequence: Synthetic oligonucleotide
cucacagaugcugagagca

SEQ ID NO: 509 - RNA, 19 nt, Artificial Sequence
  Description of Artificial Sequence: Synthetic oligonucleotide
ucacagaugcugagagcaa

SEQ ID NO: 510 - RNA, 19 nt, Artificial Sequence
  Description of Artificial Sequence: Synthetic oligonucleotide
cacagaugcugagagcaag

SEQ ID NO: 511 - RNA, 19 nt, Artificial Sequence
  Description of Artificial Sequence: Synthetic oligonucleotide
acagaugcugagagcaagu

SEQ ID NO: 512 - RNA, 19 nt, Artificial Sequence
  Description of Artificial Sequence: Synthetic oligonucleotide
cagaugcugagagcaagua

SEQ ID NO: 513 - RNA, 19 nt, Artificial Sequence
  Description of Artificial Sequence: Synthetic oligonucleotide
agaugcugagagcaaguac

SEQ ID NO: 514 - RNA, 19 nt, Artificial Sequence
  Description of Artificial Sequence: Synthetic oligonucleotide
gaugcugagagcaaguacu

SEQ ID NO: 515 - RNA, 19 nt, Artificial Sequence
  Description of Artificial Sequence: Synthetic oligonucleotide
augcugagagcaaguacuc

SEQ ID NO: 516 - RNA, 19 nt, Artificial Sequence
  Description of Artificial Sequence: Synthetic oligonucleotide
ugcugagagcaaguacucc

SEQ ID NO: 517 - RNA, 19 nt, Artificial Sequence
  Description of Artificial Sequence: Synthetic oligonucleotide
gcugagagcaaguacuccg

SEQ ID NO: 518 - RNA, 19 nt, Artificial Sequence
  Description of Artificial Sequence: Synthetic oligonucleotide
cugagagcaaguacuccga

SEQ ID NO: 519 - RNA, 19 nt, Artificial Sequence
  Description of Artificial Sequence: Synthetic oligonucleotide
ugagagcaaguacuccgag

SEQ ID NO: 520 - RNA, 19 nt, Artificial Sequence
  Description of Artificial Sequence: Synthetic oligonucleotide
gagagcaaguacuccgaga

SEQ ID NO: 521 - RNA, 19 nt, Artificial Sequence
  Description of Artificial Sequence: Synthetic oligonucleotide
agagcaaguacuccgagau

SEQ ID NO: 522 - RNA, 19 nt, Artificial Sequence
  Description of Artificial Sequence: Synthetic oligonucleotide
gagcaaguacuccgagaug

SEQ ID NO: 523 - RNA, 19 nt, Artificial Sequence
  Description of Artificial Sequence: Synthetic oligonucleotide
agcaaguacuccgagauga

SEQ ID NO: 524 - RNA, 19 nt, Artificial Sequence
  Description of Artificial Sequence: Synthetic oligonucleotide
gcaaguacuccgagaugaa

SEQ ID NO: 525 - RNA, 19 nt, Artificial Sequence
  Description of Artificial Sequence: Synthetic oligonucleotide
caaguacuccgagaugaac

SEQ ID NO: 526 - RNA, 19 nt, Artificial Sequence
  Description of Artificial Sequence: Synthetic oligonucleotide
aaguacuccgagaugaaca

SEQ ID NO: 527 - RNA, 19 nt, Artificial Sequence
  Description of Artificial Sequence: Synthetic oligonucleotide
aguacuccgagaugaacaa

SEQ ID NO: 528 - RNA, 19 nt, Artificial Sequence
  Description of Artificial Sequence: Synthetic oligonucleotide
guacuccgagaugaacaac

SEQ ID NO: 529 - RNA, 19 nt, Artificial Sequence
  Description of Artificial Sequence: Synthetic oligonucleotide
uacuccgagaugaacaacc

SEQ ID NO: 530 - RNA, 19 nt, Artificial Sequence
  Description of Artificial Sequence: Synthetic oligonucleotide
acuccgagaugaacaacca

SEQ ID NO: 531 - RNA, 19 nt, Artificial Sequence
  Description of Artificial Sequence: Synthetic oligonucleotide
cuccgagaugaacaaccaa

SEQ ID NO: 532 - RNA, 19 nt, Artificial Sequence
  Description of Artificial Sequence: Synthetic oligonucleotide
uccgagaugaacaaccaaa

SEQ ID NO: 533 - RNA, 19 nt, Artificial Sequence
  Description of Artificial Sequence: Synthetic oligonucleotide
ccgagaugaacaaccaaau

SEQ ID NO: 534 - RNA, 19 nt, Artificial Sequence
  Description of Artificial Sequence: Synthetic oligonucleotide
cgagaugaacaaccaaauu

SEQ ID NO: 535 - RNA, 19 nt, Artificial Sequence
  Description of Artificial Sequence: Synthetic oligonucleotide
gagaugaacaaccaaauug

SEQ ID NO: 536 - RNA, 19 nt, Artificial Sequence
  Description of Artificial Sequence: Synthetic oligonucleotide
agaugaacaaccaaauuga

SEQ ID NO: 537 - RNA, 19 nt, Artificial Sequence
  Description of Artificial Sequence: Synthetic oligonucleotide
gaugaacaaccaaauugac

SEQ ID NO: 538 - RNA, 19 nt, Artificial Sequence
  Description of Artificial Sequence: Synthetic oligonucleotide
augaacaaccaaauugaca

SEQ ID NO: 539 - RNA, 19 nt, Artificial Sequence
  Description of Artificial Sequence: Synthetic oligonucleotide
ugaacaaccaaauugacau

SEQ ID NO: 540 - RNA, 19 nt, Artificial Sequence
  Description of Artificial Sequence: Synthetic oligonucleotide
gaacaaccaaauugacauc

SEQ ID NO: 541 - RNA, 19 nt, Artificial Sequence
  Description of Artificial Sequence: Synthetic oligonucleotide
aacaaccaaauugacauca

SEQ ID NO: 542 - RNA, 19 nt, Artificial Sequence
  Description of Artificial Sequence: Synthetic oligonucleotide
acaaccaaauugacaucau

SEQ ID NO: 543 - RNA, 19 nt, Artificial Sequence
  Description of Artificial Sequence: Synthetic oligonucleotide
caaccaaauugacaucaug

SEQ ID NO: 544 - RNA, 19 nt, Artificial Sequence
  Description of Artificial Sequence: Synthetic oligonucleotide
aaccaaauugacaucaugc

SEQ ID NO: 545 - RNA, 19 nt, Artificial Sequence
  Description of Artificial Sequence: Synthetic oligonucleotide
accaaauugacaucaugca

SEQ ID NO: 546 - RNA, 19 nt, Artificial Sequence
  Description of Artificial Sequence: Synthetic oligonucleotide
ccaaauugacaucaugcag

SEQ ID NO: 547 - RNA, 19 nt, Artificial Sequence
  Description of Artificial Sequence: Synthetic oligonucleotide
caaauugacaucaugcagc

SEQ ID NO: 548 - RNA, 19 nt, Artificial Sequence
  Description of Artificial Sequence: Synthetic oligonucleotide
aaauugacaucaugcagcu

SEQ ID NO: 549 - RNA, 19 nt, Artificial Sequence
  Description of Artificial Sequence: Synthetic oligonucleotide
aauugacaucaugcagcug

SEQ ID NO: 550 - RNA, 19 nt, Artificial Sequence
  Description of Artificial Sequence: Synthetic oligonucleotide
auugacaucaugcagcugc

SEQ ID NO: 551 - RNA, 19 nt, Artificial Sequence
  Description of Artificial Sequence: Synthetic oligonucleotide
uugacaucaugcagcugca

SEQ ID NO: 552 - RNA, 19 nt, Artificial Sequence
  Description of Artificial Sequence: Synthetic oligonucleotide
ugacaucaugcagcugcag

SEQ ID NO: 553 - RNA, 19 nt, Artificial Sequence
  Description of Artificial Sequence: Synthetic oligonucleotide
gacaucaugcagcugcagg

SEQ ID NO: 554 - RNA, 19 nt, Artificial Sequence
  Description of Artificial Sequence: Synthetic oligonucleotide
acaucaugcagcugcaggc

SEQ ID NO: 555 - RNA, 19 nt, Artificial Sequence
  Description of Artificial Sequence: Synthetic oligonucleotide
caucaugcagcugcaggca

SEQ ID NO: 556 - RNA, 19 nt, Artificial Sequence
  Description of Artificial Sequence: Synthetic oligonucleotide
aucaugcagcugcaggcag

SEQ ID NO: 557 - RNA, 19 nt, Artificial Sequence
  Description of Artificial Sequence: Synthetic oligonucleotide
ucaugcagcugcaggcagc

SEQ ID NO: 558 - RNA, 19 nt, Artificial Sequence
  Description of Artificial Sequence: Synthetic oligonucleotide
caugcagcugcaggcagca

SEQ ID NO: 559 - RNA, 19 nt, Artificial Sequence
  Description of Artificial Sequence: Synthetic oligonucleotide
augcagcugcaggcagcac

SEQ ID NO: 560 - RNA, 19 nt, Artificial Sequence
  Description of Artificial Sequence: Synthetic oligonucleotide
ugcagcugcaggcagcaca

SEQ ID NO: 561 - RNA, 19 nt, Artificial Sequence
  Description of Artificial Sequence: Synthetic oligonucleotide
gcagcugcaggcagcacag

SEQ ID NO: 562 - RNA, 19 nt, Artificial Sequence
  Description of Artificial Sequence: Synthetic oligonucleotide
cagcugcaggcagcacaga

SEQ ID NO: 563 - RNA, 19 nt, Artificial Sequence
  Description of Artificial Sequence: Synthetic oligonucleotide
agcugcaggcagcacagac

SEQ ID NO: 564 - RNA, 19 nt, Artificial Sequence
  Description of Artificial Sequence: Synthetic oligonucleotide
gcugcaggcagcacagacg

SEQ ID NO: 565 - RNA, 19 nt, Artificial Sequence
  Description of Artificial Sequence: Synthetic oligonucleotide
cugcaggcagcacagacgg

SEQ ID NO: 566 - RNA, 19 nt, Artificial Sequence
  Description of Artificial Sequence: Synthetic oligonucleotide
ugcaggcagcacagacggu

SEQ ID NO: 567 - RNA, 19 nt, Artificial Sequence
  Description of Artificial Sequence: Synthetic oligonucleotide
gcaggcagcacagacgguc

SEQ ID NO: 568 - RNA, 19 nt, Artificial Sequence
  Description of Artificial Sequence: Synthetic oligonucleotide
caggcagcacagacgguca

SEQ ID NO: 569 - RNA, 19 nt, Artificial Sequence
  Description of Artificial Sequence: Synthetic oligonucleotide
aggcagcacagacggucac

SEQ ID NO: 570 - RNA, 19 nt, Artificial Sequence
  Description of Artificial Sequence: Synthetic oligonucleotide
ggcagcacagacggucacu

SEQ ID NO: 571 - RNA, 19 nt, Artificial Sequence
  Description of Artificial Sequence: Synthetic oligonucleotide
gcagcacagacggucacuc

SEQ ID NO: 572 - RNA, 19 nt, Artificial Sequence
  Description of Artificial Sequence: Synthetic oligonucleotide
cagcacagacggucacuca

SEQ ID NO: 573 - RNA, 19 nt, Artificial Sequence
  Description of Artificial Sequence: Synthetic oligonucleotide
agcacagacggucacucag

SEQ ID NO: 574 - RNA, 19 nt, Artificial Sequence
  Description of Artificial Sequence: Synthetic oligonucleotide
gcacagacggucacucaga

SEQ ID NO: 575 - RNA, 19 nt, Artificial Sequence
  Description of Artificial Sequence: Synthetic oligonucleotide
cacagacggucacucagac

SEQ ID NO: 576 - RNA, 19 nt, Artificial Sequence
  Description of Artificial Sequence: Synthetic oligonucleotide
acagacggucacucagacc

SEQ ID NO: 577 - RNA, 19 nt, Artificial Sequence
  Description of Artificial Sequence: Synthetic oligonucleotide
cagacggucacucagaccu

SEQ ID NO: 578 - RNA, 19 nt, Artificial Sequence
  Description of Artificial Sequence: Synthetic oligonucleotide
agacggucacucagaccuc

SEQ ID NO: 579 - RNA, 19 nt, Artificial Sequence
  Description of Artificial Sequence: Synthetic oligonucleotide
gacggucacucagaccucc

SEQ ID NO: 580 - RNA, 19 nt, Artificial Sequence
  Description of Artificial Sequence: Synthetic oligonucleotide
acggucacucagaccuccg

SEQ ID NO: 581 - RNA, 19 nt, Artificial Sequence
  Description of Artificial Sequence: Synthetic oligonucleotide
cggucacucagaccuccgc

SEQ ID NO: 582 - RNA, 19 nt, Artificial Sequence
  Description of Artificial Sequence: Synthetic oligonucleotide
ggucacucagaccuccgca

SEQ ID NO: 583 - RNA, 19 nt, Artificial Sequence
  Description of Artificial Sequence: Synthetic oligonucleotide
gucacucagaccuccgcag

SEQ ID NO: 584 - RNA, 19 nt, Artificial Sequence
  Description of Artificial Sequence: Synthetic oligonucleotide
ucacucagaccuccgcaga

SEQ ID NO: 585 - RNA, 19 nt, Artificial Sequence
  Description of Artificial Sequence: Synthetic oligonucleotide
cacucagaccuccgcagau

SEQ ID NO: 586 - RNA, 19 nt, Artificial Sequence
  Description of Artificial Sequence: Synthetic oligonucleotide
acucagaccuccgcagaug

SEQ ID NO: 587 - RNA, 19 nt, Artificial Sequence
  Description of Artificial Sequence: Synthetic oligonucleotide
cucagaccuccgcagaugc

SEQ ID NO: 588 - RNA, 19 nt, Artificial Sequence
  Description of Artificial Sequence: Synthetic oligonucleotide
ucagaccuccgcagaugcc

SEQ ID NO: 589 - RNA, 19 nt, Artificial Sequence
  Description of Artificial Sequence: Synthetic oligonucleotide
cagaccuccgcagaugcca

SEQ ID NO: 590 - RNA, 19 nt, Artificial Sequence
  Description of Artificial Sequence: Synthetic oligonucleotide
agaccuccgcagaugccau

SEQ ID NO: 591 - RNA, 19 nt, Artificial Sequence
  Description of Artificial Sequence: Synthetic oligonucleotide
gaccuccgcagaugccauc

SEQ ID NO: 592 - RNA, 19 nt, Artificial Sequence
  Description of Artificial Sequence: Synthetic oligonucleotide
accuccgcagaugccaucu

SEQ ID NO: 593 - RNA, 19 nt, Artificial Sequence
  Description of Artificial Sequence: Synthetic oligonucleotide
ccuccgcagaugccaucua

SEQ ID NO: 594 - RNA, 19 nt, Artificial Sequence
  Description of Artificial Sequence: Synthetic oligonucleotide
cuccgcagaugccaucuac

SEQ ID NO: 595 - RNA, 19 nt, Artificial Sequence
  Description of Artificial Sequence: Synthetic oligonucleotide
uccgcagaugccaucuacg

SEQ ID NO: 596 - RNA, 19 nt, Artificial Sequence
  Description of Artificial Sequence: Synthetic oligonucleotide
ccgcagaugccaucuacga

SEQ ID NO: 597 - RNA, 19 nt, Artificial Sequence
  Description of Artificial Sequence: Synthetic oligonucleotide
cgcagaugccaucuacgac

SEQ ID NO: 598 - RNA, 19 nt, Artificial Sequence
  Description of Artificial Sequence: Synthetic oligonucleotide
gcagaugccaucuacgacu

SEQ ID NO: 599 - RNA, 19 nt, Artificial Sequence
  Description of Artificial Sequence: Synthetic oligonucleotide
cagaugccaucuacgacug

SEQ ID NO: 600 - RNA, 19 nt, Artificial Sequence
  Description of Artificial Sequence: Synthetic oligonucleotide
agaugccaucuacgacugc

SEQ ID NO: 601 - RNA, 19 nt, Artificial Sequence
  Description of Artificial Sequence: Synthetic oligonucleotide
gaugccaucuacgacugcu

SEQ ID NO: 602 - RNA, 19 nt, Artificial Sequence
  Description of Artificial Sequence: Synthetic oligonucleotide
augccaucuacgacugcuc

SEQ ID NO: 603 - RNA, 19 nt, Artificial Sequence
  Description of Artificial Sequence: Synthetic oligonucleotide
ugccaucuacgacugcucu

SEQ ID NO: 604 - RNA, 19 nt, Artificial Sequence
  Description of Artificial Sequence: Synthetic oligonucleotide
gccaucuacgacugcucuu

SEQ ID NO: 605 - RNA, 19 nt, Artificial Sequence
  Description of Artificial Sequence: Synthetic oligonucleotide
ccaucuacgacugcucuuc

SEQ ID NO: 606 - RNA, 19 nt, Artificial Sequence
  Description of Artificial Sequence: Synthetic oligonucleotide
caucuacgacugcucuucc

SEQ ID NO: 607 - RNA, 19 nt, Artificial Sequence
  Description of Artificial Sequence: Synthetic oligonucleotide
aucuacgacugcucuuccc

SEQ ID NO: 608 - RNA, 19 nt, Artificial Sequence
  Description of Artificial Sequence: Synthetic oligonucleotide
ucuacgacugcucuucccu

SEQ ID NO: 609 - RNA, 19 nt, Artificial Sequence
  Description of Artificial Sequence: Synthetic oligonucleotide
cuacgacugcucuucccuc

SEQ ID NO: 610 - RNA, 19 nt, Artificial Sequence
  Description of Artificial Sequence: Synthetic oligonucleotide
uacgacugcucuucccucu

SEQ ID NO: 611 - RNA, 19 nt, Artificial Sequence
  Description of Artificial Sequence: Synthetic oligonucleotide
acgacugcucuucccucua

SEQ ID NO: 612 - RNA, 19 nt, Artificial Sequence
  Description of Artificial Sequence: Synthetic oligonucleotide
cgacugcucuucccucuac

SEQ ID NO: 613 - RNA, 19 nt, Artificial Sequence
  Description of Artificial Sequence: Synthetic oligonucleotide
gacugcucuucccucuacc

SEQ ID NO: 614 - RNA, 19 nt, Artificial Sequence
  Description of Artificial Sequence: Synthetic oligonucleotide
acugcucuucccucuacca

SEQ ID NO: 615 - RNA, 19 nt, Artificial Sequence
  Description of Artificial Sequence: Synthetic oligonucleotide
cugcucuucccucuaccag

SEQ ID NO: 616 - RNA, 19 nt, Artificial Sequence
  Description of Artificial Sequence: Synthetic oligonucleotide
ugcucuucccucuaccaga

SEQ ID NO: 617 - RNA, 19 nt, Artificial Sequence
  Description of Artificial Sequence: Synthetic oligonucleotide
gcucuucccucuaccagaa

SEQ ID NO: 618 - RNA, 19 nt, Artificial Sequence
  Description of Artificial Sequence: Synthetic oligonucleotide
cucuucccucuaccagaag

SEQ ID NO: 619 - RNA, 19 nt, Artificial Sequence
  Description of Artificial Sequence: Synthetic oligonucleotide
ucuucccucuaccagaaga

SEQ ID NO: 620 - RNA, 19 nt, Artificial Sequence
  Description of Artificial Sequence: Synthetic oligonucleotide
cuucccucuaccagaagaa

SEQ ID NO: 621 - RNA, 19 nt, Artificial Sequence
  Description of Artificial Sequence: Synthetic oligonucleotide
uucccucuaccagaagaac

SEQ ID NO: 622 - RNA, 19 nt, Artificial Sequence
  Description of Artificial Sequence: Synthetic oligonucleotide
ucccucuaccagaagaacu

SEQ ID NO: 623 - RNA, 19 nt, Artificial Sequence
  Description of Artificial Sequence: Synthetic oligonucleotide
cccucuaccagaagaacua

SEQ ID NO: 624 - RNA, 19 nt, Artificial Sequence
  Description of Artificial Sequence: Synthetic oligonucleotide
ccucuaccagaagaacuac

SEQ ID NO: 625 - RNA, 19 nt, Artificial Sequence
  Description of Artificial Sequence: Synthetic oligonucleotide
cucuaccagaagaacuacc

SEQ ID NO: 626 - RNA, 19 nt, Artificial Sequence
  Description of Artificial Sequence: Synthetic oligonucleotide
ucuaccagaagaacuaccg

SEQ ID NO: 627 - RNA, 19 nt, Artificial Sequence
  Description of Artificial Sequence: Synthetic oligonucleotide
cuaccagaagaacuaccgc

SEQ ID NO: 628 - RNA, 19 nt, Artificial Sequence
  Description of Artificial Sequence: Synthetic oligonucleotide
uaccagaagaacuaccgca

SEQ ID NO: 629 - RNA, 19 nt, Artificial Sequence
  Description of Artificial Sequence: Synthetic oligonucleotide
accagaagaacuaccgcau

SEQ ID NO: 630 - RNA, 19 nt, Artificial Sequence
  Description of Artificial Sequence: Synthetic oligonucleotide
ccagaagaacuaccgcauc

SEQ ID NO: 631 - RNA, 19 nt, Artificial Sequence
  Description of Artificial Sequence: Synthetic oligonucleotide
cagaagaacuaccgcaucu

SEQ ID NO: 632 - RNA, 19 nt, Artificial Sequence
  Description of Artificial Sequence: Synthetic oligonucleotide
agaagaacuaccgcaucuc

SEQ ID NO: 633 - RNA, 19 nt, Artificial Sequence
  Description of Artificial Sequence: Synthetic oligonucleotide
gaagaacuaccgcaucucu

SEQ ID NO: 634 - RNA, 19 nt, Artificial Sequence
  Description of Artificial Sequence: Synthetic oligonucleotide
aagaacuaccgcaucucug

SEQ ID NO: 635 - RNA, 19 nt, Artificial Sequence
  Description of Artificial Sequence: Synthetic oligonucleotide
agaacuaccgcaucucugg

SEQ ID NO: 636 - RNA, 19 nt, Artificial Sequence
  Description of Artificial Sequence: Synthetic oligonucleotide
gaacuaccgcaucucugga

SEQ ID NO: 637 - RNA, 19 nt, Artificial Sequence
  Description of Artificial Sequence: Synthetic oligonucleotide
aacuaccgcaucucuggag

SEQ ID NO: 638 - RNA, 19 nt, Artificial Sequence
  Description of Artificial Sequence: Synthetic oligonucleotide
acuaccgcaucucuggagu

SEQ ID NO: 639 - RNA, 19 nt, Artificial Sequence
  Description of Artificial Sequence: Synthetic oligonucleotide
cuaccgcaucucuggagug

SEQ ID NO: 640 - RNA, 19 nt, Artificial Sequence
  Description of Artificial Sequence: Synthetic oligonucleotide
uaccgcaucucuggagugu

SEQ ID NO: 641 - RNA, 19 nt, Artificial Sequence
  Description of Artificial Sequence: Synthetic oligonucleotide
accgcaucucuggagugua

SEQ ID NO: 642 - RNA, 19 nt, Artificial Sequence
  Description of Artificial Sequence: Synthetic oligonucleotide
ccgcaucucuggaguguau

SEQ ID NO: 643 - RNA, 19 nt, Artificial Sequence
  Description of Artificial Sequence: Synthetic oligonucleotide
cgcaucucuggaguguaua

SEQ ID NO: 644 - RNA, 19 nt, Artificial Sequence
  Description of Artificial Sequence: Synthetic oligonucleotide
gcaucucuggaguguauaa

SEQ ID NO: 645 - RNA, 19 nt, Artificial Sequence
  Description of Artificial Sequence: Synthetic oligonucleotide
caucucuggaguguauaag

SEQ ID NO: 646 - RNA, 19 nt, Artificial Sequence
  Description of Artificial Sequence: Synthetic oligonucleotide
aucucuggaguguauaagc

SEQ ID NO: 647 - RNA, 19 nt, Artificial Sequence
  Description of Artificial Sequence: Synthetic oligonucleotide
ucucuggaguguauaagcu

SEQ ID NO: 648 - RNA, 19 nt, Artificial Sequence
  Description of Artificial Sequence: Synthetic oligonucleotide
cucuggaguguauaagcuu

SEQ ID NO: 649 - RNA, 19 nt, Artificial Sequence
  Description of Artificial Sequence: Synthetic oligonucleotide
ucuggaguguauaagcuuc

SEQ ID NO: 650 - RNA, 19 nt, Artificial Sequence
  Description of Artificial Sequence: Synthetic oligonucleotide
cuggaguguauaagcuucc

SEQ ID NO: 651 - RNA, 19 nt, Artificial Sequence
  Description of Artificial Sequence: Synthetic oligonucleotide
uggaguguauaagcuuccu

SEQ ID NO: 652 - RNA, 19 nt, Artificial Sequence
  Description of Artificial Sequence: Synthetic oligonucleotide
ggaguguauaagcuuccuc

SEQ ID NO: 653 - RNA, 19 nt, Artificial Sequence
  Description of Artificial Sequence: Synthetic oligonucleotide
gaguguauaagcuuccucc

SEQ ID NO: 654 - RNA, 19 nt, Artificial Sequence
  Description of Artificial Sequence: Synthetic oligonucleotide
aguguauaagcuuccuccu

SEQ ID NO: 655 - RNA, 19 nt, Artificial Sequence
  Description of Artificial Sequence: Synthetic oligonucleotide
guguauaagcuuccuccug

SEQ ID NO: 656 - RNA, 19 nt, Artificial Sequence
  Description of Artificial Sequence: Synthetic oligonucleotide
uguauaagcuuccuccuga

SEQ ID NO: 657 - RNA, 19 nt, Artificial Sequence
  Description of Artificial Sequence: Synthetic oligonucleotide
guauaagcuuccuccugau

SEQ ID NO: 658 - RNA, 19 nt, Artificial Sequence
  Description of Artificial Sequence: Synthetic oligonucleotide
uauaagcuuccuccugaug

SEQ ID NO: 659 - RNA, 19 nt, Artificial Sequence
  Description of Artificial Sequence: Synthetic oligonucleotide
auaagcuuccuccugauga

SEQ ID NO: 660 - RNA, 19 nt, Artificial Sequence
  Description of Artificial Sequence: Synthetic oligonucleotide
uaagcuuccuccugaugac

SEQ ID NO: 661 - RNA, 19 nt, Artificial Sequence
  Description of Artificial Sequence: Synthetic oligonucleotide
aagcuuccuccugaugacu

SEQ ID NO: 662 - RNA, 19 nt, Artificial Sequence
  Description of Artificial Sequence: Synthetic oligonucleotide
agcuuccuccugaugacuu

SEQ ID NO: 663 - RNA, 19 nt, Artificial Sequence
  Description of Artificial Sequence: Synthetic oligonucleotide
gcuuccuccugaugacuuc

SEQ ID NO: 664 - RNA, 19 nt, Artificial Sequence
  Description of Artificial Sequence: Synthetic oligonucleotide
cuuccuccugaugacuucc

SEQ ID NO: 665 - RNA, 19 nt, Artificial Sequence
  Description of Artificial Sequence: Synthetic oligonucleotide
uuccuccugaugacuuccu

SEQ ID NO: 666 - RNA, 19 nt, Artificial Sequence
  Description of Artificial Sequence: Synthetic oligonucleotide
uccuccugaugacuuccug

SEQ ID NO: 667 - RNA, 19 nt, Artificial Sequence
  Description of Artificial Sequence: Synthetic oligonucleotide
ccuccugaugacuuccugg

SEQ ID NO: 668 - RNA, 19 nt, Artificial Sequence
  Description of Artificial Sequence: Synthetic oligonucleotide
cuccugaugacuuccuggg

SEQ ID NO: 669 - RNA, 19 nt, Artificial Sequence
  Description of Artificial Sequence: Synthetic oligonucleotide
uccugaugacuuccugggc

SEQ ID NO: 670 - RNA, 19 nt, Artificial Sequence
  Description of Artificial Sequence: Synthetic oligonucleotide
ccugaugacuuccugggca

SEQ ID NO: 671 - RNA, 19 nt, Artificial Sequence
  Description of Artificial Sequence: Synthetic oligonucleotide
cugaugacuuccugggcag

SEQ ID NO: 672 - RNA, 19 nt, Artificial Sequence
  Description of Artificial Sequence: Synthetic oligonucleotide
ugaugacuuccugggcagc

SEQ ID NO: 673 - RNA, 19 nt, Artificial Sequence
  Description of Artificial Sequence: Synthetic oligonucleotide
gaugacuuccugggcagcc

SEQ ID NO: 674 - RNA, 19 nt, Artificial Sequence
  Description of Artificial Sequence: Synthetic oligonucleotide
augacuuccugggcagccc

SEQ ID NO: 675 - RNA, 19 nt, Artificial Sequence
  Description of Artificial Sequence: Synthetic oligonucleotide
ugacuuccugggcagcccu

SEQ ID NO: 676 - RNA, 19 nt, Artificial Sequence
  Description of Artificial Sequence: Synthetic oligonucleotide
gacuuccugggcagcccug

SEQ ID NO: 677 - RNA, 19 nt, Artificial Sequence
  Description of Artificial Sequence: Synthetic oligonucleotide
acuuccugggcagcccuga

SEQ ID NO: 678 - RNA, 19 nt, Artificial Sequence
  Description of Artificial Sequence: Synthetic oligonucleotide
cuuccugggcagcccugaa

SEQ ID NO: 679 - RNA, 19 nt, Artificial Sequence
  Description of Artificial Sequence: Synthetic oligonucleotide
uuccugggcagcccugaac

SEQ ID NO: 680 - RNA, 19 nt, Artificial Sequence
  Description of Artificial Sequence: Synthetic oligonucleotide
uccugggcagcccugaacu

SEQ ID NO: 681 - RNA, 19 nt, Artificial Sequence
  Description of Artificial Sequence: Synthetic oligonucleotide
ccugggcagcccugaacug

SEQ ID NO: 682 - RNA, 19 nt, Artificial Sequence
  Description of Artificial Sequence: Synthetic oligonucleotide
cugggcagcccugaacugg

SEQ ID NO: 683 - RNA, 19 nt, Artificial Sequence
  Description of Artificial Sequence: Synthetic oligonucleotide
ugggcagcccugaacugga

SEQ ID NO: 684 - RNA, 19 nt, Artificial Sequence
  Description of Artificial Sequence: Synthetic oligonucleotide
gggcagcccugaacuggag

SEQ ID NO: 685 - RNA, 19 nt, Artificial Sequence
  Description of Artificial Sequence: Synthetic oligonucleotide
ggcagcccugaacuggagg

SEQ ID NO: 686 - RNA, 19 nt, Artificial Sequence
  Description of Artificial Sequence: Synthetic oligonucleotide
gcagcccugaacuggaggu

SEQ ID NO: 687 - RNA, 19 nt, Artificial Sequence
  Description of Artificial Sequence: Synthetic oligonucleotide
cagcccugaacuggaggug

SEQ ID NO: 688 - RNA, 19 nt, Artificial Sequence
  Description of Artificial Sequence: Synthetic oligonucleotide
agcccugaacuggaggugu

SEQ ID NO: 689 - RNA, 19 nt, Artificial Sequence
  Description of Artificial Sequence: Synthetic oligonucleotide
gcccugaacuggagguguu

SEQ ID NO: 690 - RNA, 19 nt, Artificial Sequence
  Description of Artificial Sequence: Synthetic oligonucleotide
cccugaacuggagguguuc

SEQ ID NO: 691 - RNA, 19 nt, Artificial Sequence
  Description of Artificial Sequence: Synthetic oligonucleotide
ccugaacuggagguguucu

SEQ ID NO: 692 - RNA, 19 nt, Artificial Sequence
  Description of Artificial Sequence: Synthetic oligonucleotide
cugaacuggagguguucug

SEQ ID NO: 693 - RNA, 19 nt, Artificial Sequence
  Description of Artificial Sequence: Synthetic oligonucleotide
ugaacuggagguguucugu

SEQ ID NO: 694 - RNA, 19 nt, Artificial Sequence
  Description of Artificial Sequence: Synthetic oligonucleotide
gaacuggagguguucugug

SEQ ID NO: 695 - RNA, 19 nt, Artificial Sequence
  Description of Artificial Sequence: Synthetic oligonucleotide
aacuggagguguucuguga

SEQ ID NO: 696 - RNA, 19 nt, Artificial Sequence
  Description of Artificial Sequence: Synthetic oligonucleotide
acuggagguguucugugac

SEQ ID NO: 697 - RNA, 19 nt, Artificial Sequence
  Description of Artificial Sequence: Synthetic oligonucleotide
cuggagguguucugugaca

SEQ ID NO: 698 - RNA, 19 nt, Artificial Sequence
  Description of Artificial Sequence: Synthetic oligonucleotide
uggagguguucugugacau

SEQ ID NO: 699 - RNA, 19 nt, Artificial Sequence
  Description of Artificial Sequence: Synthetic oligonucleotide
ggagguguucugugacaug

SEQ ID NO: 700 - RNA, 19 nt, Artificial Sequence
  Description of Artificial Sequence: Synthetic oligonucleotide
gagguguucugugacaugg

SEQ ID NO: 701 - RNA, 19 nt, Artificial Sequence
  Description of Artificial Sequence: Synthetic oligonucleotide
agguguucugugacaugga

SEQ ID NO: 702 - RNA, 19 nt, Artificial Sequence
  Description of Artificial Sequence: Synthetic oligonucleotide
gguguucugugacauggag

SEQ ID NO: 703 - RNA, 19 nt, Artificial Sequence
  Description of Artificial Sequence: Synthetic oligonucleotide
guguucugugacauggaga

SEQ ID NO: 704 - RNA, 19 nt, Artificial Sequence
  Description of Artificial Sequence: Synthetic oligonucleotide
uguucugugacauggagac

SEQ ID NO: 705 - RNA, 19 nt, Artificial Sequence
  Description of Artificial Sequence: Synthetic oligonucleotide
guucugugacauggagacu

SEQ ID NO: 706 - RNA, 19 nt, Artificial Sequence
  Description of Artificial Sequence: Synthetic oligonucleotide
uucugugacauggagacuu

SEQ ID NO: 707 - RNA, 19 nt, Artificial Sequence
  Description of Artificial Sequence: Synthetic oligonucleotide
ucugugacauggagacuuc

SEQ ID NO: 708 - RNA, 19 nt, Artificial Sequence
  Description of Artificial Sequence: Synthetic oligonucleotide
cugugacauggagacuuca

SEQ ID NO: 709 - RNA, 19 nt, Artificial Sequence
  Description of Artificial Sequence: Synthetic oligonucleotide
ugugacauggagacuucag

SEQ ID NO: 710 - RNA, 19 nt, Artificial Sequence
  Description of Artificial Sequence: Synthetic oligonucleotide
gugacauggagacuucagg

SEQ ID NO: 711 - RNA, 19 nt, Artificial Sequence
  Description of Artificial Sequence: Synthetic oligonucleotide
ugacauggagacuucaggc

SEQ ID NO: 712 - RNA, 19 nt, Artificial Sequence
  Description of Artificial Sequence: Synthetic oligonucleotide
gacauggagacuucaggcg

SEQ ID NO: 713 - RNA, 19 nt, Artificial Sequence
  Description of Artificial Sequence: Synthetic oligonucleotide
acauggagacuucaggcgg

SEQ ID NO: 714 - RNA, 19 nt, Artificial Sequence
  Description of Artificial Sequence: Synthetic oligonucleotide
cauggagacuucaggcgga

SEQ ID NO: 715 - RNA, 19 nt, Artificial Sequence
  Description of Artificial Sequence: Synthetic oligonucleotide
auggagacuucaggcggag

SEQ ID NO: 716 - RNA, 19 nt, Artificial Sequence
  Description of Artificial Sequence: Synthetic oligonucleotide
uggagacuucaggcggagg

SEQ ID NO: 717 - RNA, 19 nt, Artificial Sequence
  Description of Artificial Sequence: Synthetic oligonucleotide
ggagacuucaggcggaggc

SEQ ID NO: 718 - RNA, 19 nt, Artificial Sequence
  Description of Artificial Sequence: Synthetic oligonucleotide
gagacuucaggcggaggcu

SEQ ID NO: 719 - RNA, 19 nt, Artificial Sequence
  Description of Artificial Sequence: Synthetic oligonucleotide
agacuucaggcggaggcug

SEQ ID NO: 720 - RNA, 19 nt, Artificial Sequence
  Description of Artificial Sequence: Synthetic oligonucleotide
gacuucaggcggaggcugg

SEQ ID NO: 721 - RNA, 19 nt, Artificial Sequence
  Description of Artificial Sequence: Synthetic oligonucleotide
acuucaggcggaggcugga

SEQ ID NO: 722 - RNA, 19 nt, Artificial Sequence
  Description of Artificial Sequence: Synthetic oligonucleotide
cuucaggcggaggcuggac

SEQ ID NO: 723 - RNA, 19 nt, Artificial Sequence
  Description of Artificial Sequence: Synthetic oligonucleotide
uucaggcggaggcuggacc

SEQ ID NO: 724 - RNA, 19 nt, Artificial Sequence
  Description of Artificial Sequence: Synthetic oligonucleotide
ucaggcggaggcuggacca

SEQ ID NO: 725 - RNA, 19 nt, Artificial Sequence
  Description of Artificial Sequence: Synthetic oligonucleotide
caggcggaggcuggaccau

SEQ ID NO: 726 - RNA, 19 nt, Artificial Sequence
  Description of Artificial Sequence: Synthetic oligonucleotide
aggcggaggcuggaccauc

SEQ ID NO: 727 - RNA, 19 nt, Artificial Sequence
  Description of Artificial Sequence: Synthetic oligonucleotide
ggcggaggcuggaccauca

SEQ ID NO: 728 - RNA, 19 nt, Artificial Sequence
  Description of Artificial Sequence: Synthetic oligonucleotide
gcggaggcuggaccaucau

SEQ ID NO: 729 - RNA, 19 nt, Artificial Sequence
  Description of Artificial Sequence: Synthetic oligonucleotide
cggaggcuggaccaucauc

SEQ ID NO: 730 - RNA, 19 nt, Artificial Sequence
  Description of Artificial Sequence: Synthetic oligonucleotide
ggaggcuggaccaucaucc

SEQ ID NO: 731 - RNA, 19 nt, Artificial Sequence
  Description of Artificial Sequence: Synthetic oligonucleotide
gaggcuggaccaucaucca

SEQ ID NO: 732 - RNA, 19 nt, Artificial Sequence
  Description of Artificial Sequence: Synthetic oligonucleotide
aggcuggaccaucauccag

SEQ ID NO: 733 - RNA, 19 nt, Artificial Sequence
  Description of Artificial Sequence: Synthetic oligonucleotide
ggcuggaccaucauccaga

SEQ ID NO: 734 - RNA, 19 nt, Artificial Sequence
  Description of Artificial Sequence: Synthetic oligonucleotide
gcuggaccaucauccagag

SEQ ID NO: 735 - RNA, 19 nt, Artificial Sequence
  Description of Artificial Sequence: Synthetic oligonucleotide
cuggaccaucauccagaga

SEQ ID NO: 736 - RNA, 19 nt, Artificial Sequence
  Description of Artificial Sequence: Synthetic oligonucleotide
uggaccaucauccagagac

SEQ ID NO: 737 - RNA, 19 nt, Artificial Sequence
  Description of Artificial Sequence: Synthetic oligonucleotide
ggaccaucauccagagacg

SEQ ID NO: 738 - RNA, 19 nt, Artificial Sequence
  Description of Artificial Sequence: Synthetic oligonucleotide
gaccaucauccagagacga

SEQ ID NO: 739 - RNA, 19 nt, Artificial Sequence
  Description of Artificial Sequence: Synthetic oligonucleotide
accaucauccagagacgaa

SEQ ID NO: 740 - RNA, 19 nt, Artificial Sequence
  Description of Artificial Sequence: Synthetic oligonucleotide
ccaucauccagagacgaaa

SEQ ID NO: 741 - RNA, 19 nt, Artificial Sequence
  Description of Artificial Sequence: Synthetic oligonucleotide
caucauccagagacgaaaa

SEQ ID NO: 742 - RNA, 19 nt, Artificial Sequence
  Description of Artificial Sequence: Synthetic oligonucleotide
aucauccagagacgaaaaa

SEQ ID NO: 743 - RNA, 19 nt, Artificial Sequence
  Description of Artificial Sequence: Synthetic oligonucleotide
ucauccagagacgaaaaag

SEQ ID NO: 744 - RNA, 19 nt, Artificial Sequence
  Description of Artificial Sequence: Synthetic oligonucleotide
cauccagagacgaaaaagu

SEQ ID NO: 745 - RNA, 19 nt, Artificial Sequence
  Description of Artificial Sequence: Synthetic oligonucleotide
auccagagacgaaaaagug

SEQ ID NO: 746 - RNA, 19 nt, Artificial Sequence
  Description of Artificial Sequence: Synthetic oligonucleotide
uccagagacgaaaaagugg

SEQ ID NO: 747 - RNA, 19 nt, Artificial Sequence
  Description of Artificial Sequence: Synthetic oligonucleotide
ccagagacgaaaaaguggc

SEQ ID NO: 748 - RNA, 19 nt, Artificial Sequence
  Description of Artificial Sequence: Synthetic oligonucleotide
cagagacgaaaaaguggcc

SEQ ID NO: 749 - RNA, 19 nt, Artificial Sequence
  Description of Artificial Sequence: Synthetic oligonucleotide
agagacgaaaaaguggccu

SEQ ID NO: 750 - RNA, 19 nt, Artificial Sequence
  Description of Artificial Sequence: Synthetic oligonucleotide
gagacgaaaaaguggccuu

SEQ ID NO: 751 - RNA, 19 nt, Artificial Sequence
  Description of Artificial Sequence: Synthetic oligonucleotide
agacgaaaaaguggccuug

SEQ ID NO: 752 - RNA, 19 nt, Artificial Sequence
  Description of Artificial Sequence: Synthetic oligonucleotide
gacgaaaaaguggccuugu

SEQ ID NO: 753 - RNA, 19 nt, Artificial Sequence
  Description of Artificial Sequence: Synthetic oligonucleotide
acgaaaaaguggccuuguc

SEQ ID NO: 754 - RNA, 19 nt, Artificial Sequence
  Description of Artificial Sequence: Synthetic oligonucleotide
cgaaaaaguggccuugucu

SEQ ID NO: 755 - RNA, 19 nt, Artificial Sequence
  Description of Artificial Sequence: Synthetic oligonucleotide
gaaaaaguggccuugucuc

SEQ ID NO: 756 - RNA, 19 nt, Artificial Sequence
  Description of Artificial Sequence: Synthetic oligonucleotide
aaaaaguggccuugucucc

SEQ ID NO: 757 - RNA, 19 nt, Artificial Sequence
  Description of Artificial Sequence: Synthetic oligonucleotide
aaaaguggccuugucuccu

SEQ ID NO: 758 - RNA, 19 nt, Artificial Sequence
  Description of Artificial Sequence: Synthetic oligonucleotide
aaaguggccuugucuccuu

SEQ ID NO: 759 - RNA, 19 nt, Artificial Sequence
  Description of Artificial Sequence: Synthetic oligonucleotide
aaguggccuugucuccuuc

SEQ ID NO: 760 - RNA, 19 nt, Artificial Sequence
  Description of Artificial Sequence: Synthetic oligonucleotide
aguggccuugucuccuucu

SEQ ID NO: 761 - RNA, 19 nt, Artificial Sequence
  Description of Artificial Sequence: Synthetic oligonucleotide
guggccuugucuccuucua

SEQ ID NO: 762 - RNA, 19 nt, Artificial Sequence
  Description of Artificial Sequence: Synthetic oligonucleotide
uggccuugucuccuucuac

SEQ ID NO: 763 - RNA, 19 nt, Artificial Sequence
  Description of Artificial Sequence: Synthetic oligonucleotide
ggccuugucuccuucuacc

SEQ ID NO: 764 - RNA, 19 nt, Artificial Sequence
  Description of Artificial Sequence: Synthetic oligonucleotide
gccuugucuccuucuaccg

SEQ ID NO: 765 - RNA, 19 nt, Artificial Sequence
  Description of Artificial Sequence: Synthetic oligonucleotide
ccuugucuccuucuaccgg

SEQ ID NO: 766 - RNA, 19 nt, Artificial Sequence
  Description of Artificial Sequence: Synthetic oligonucleotide
cuugucuccuucuaccggg

SEQ ID NO: 767 - RNA, 19 nt, Artificial Sequence
  Description of Artificial Sequence: Synthetic oligonucleotide
uugucuccuucuaccggga

SEQ ID NO: 768 - RNA, 19 nt, Artificial Sequence
  Description of Artificial Sequence: Synthetic oligonucleotide
ugucuccuucuaccgggac

SEQ ID NO: 769 - RNA, 19 nt, Artificial Sequence
  Description of Artificial Sequence: Synthetic oligonucleotide
gucuccuucuaccgggacu

SEQ ID NO: 770 - RNA, 19 nt, Artificial Sequence
  Description of Artificial Sequence: Synthetic oligonucleotide
ucuccuucuaccgggacug

SEQ ID NO: 771 - RNA, 19 nt, Artificial Sequence
  Description of Artificial Sequence: Synthetic oligonucleotide
cuccuucuaccgggacugg

SEQ ID NO: 772 - RNA, 19 nt, Artificial Sequence
  Description of Artificial Sequence: Synthetic oligonucleotide
uccuucuaccgggacugga

SEQ ID NO: 773 - RNA, 19 nt, Artificial Sequence
  Description of Artificial Sequence: Synthetic oligonucleotide
ccuucuaccgggacuggaa

SEQ ID NO: 774 - RNA, 19 nt, Artificial Sequence
  Description of Artificial Sequence: Synthetic oligonucleotide
cuucuaccgggacuggaag

SEQ ID NO: 775 - RNA, 19 nt, Artificial Sequence
  Description of Artificial Sequence: Synthetic oligonucleotide
uucuaccgggacuggaagc

SEQ ID NO: 776 - RNA, 19 nt, Artificial Sequence
  Description of Artificial Sequence: Synthetic oligonucleotide
ucuaccgggacuggaagca

SEQ ID NO: 777 - RNA, 19 nt, Artificial Sequence
  Description of Artificial Sequence: Synthetic oligonucleotide
cuaccgggacuggaagcag

SEQ ID NO: 778 - RNA, 19 nt, Artificial Sequence
  Description of Artificial Sequence: Synthetic oligonucleotide
uaccgggacuggaagcagu

SEQ ID NO: 779 - RNA, 19 nt, Artificial Sequence
  Description of Artificial Sequence: Synthetic oligonucleotide
accgggacuggaagcagua

SEQ ID NO: 780 - RNA, 19 nt, Artificial Sequence
  Description of Artificial Sequence: Synthetic oligonucleotide
ccgggacuggaagcaguac

SEQ ID NO: 781 - RNA, 19 nt, Artificial Sequence
  Description of Artificial Sequence: Synthetic oligonucleotide
cgggacuggaagcaguaca

SEQ ID NO: 782 - RNA, 19 nt, Artificial Sequence
  Description of Artificial Sequence: Synthetic oligonucleotide
gggacuggaagcaguacaa

SEQ ID NO: 783 - RNA, 19 nt, Artificial Sequence
  Description of Artificial Sequence: Synthetic oligonucleotide
ggacuggaagcaguacaag

SEQ ID NO: 784 - RNA, 19 nt, Artificial Sequence
  Description of Artificial Sequence: Synthetic oligonucleotide
gacuggaagcaguacaagc

SEQ ID NO: 785 - RNA, 19 nt, Artificial Sequence
  Description of Artificial Sequence: Synthetic oligonucleotide
acuggaagcaguacaagca

SEQ ID NO: 786 - RNA, 19 nt, Artificial Sequence
  Description of Artificial Sequence: Synthetic oligonucleotide
cuggaagcaguacaagcag

SEQ ID NO: 787 - RNA, 19 nt, Artificial Sequence
  Description of Artificial Sequence: Synthetic oligonucleotide
uggaagcaguacaagcagg

SEQ ID NO: 788 - RNA, 19 nt, Artificial Sequence
  Description of Artificial Sequence: Synthetic oligonucleotide
ggaagcaguacaagcaggg

SEQ ID NO: 789 - RNA, 19 nt, Artificial Sequence
  Description of Artificial Sequence: Synthetic oligonucleotide
gaagcaguacaagcagggc

SEQ ID NO: 790 - RNA, 19 nt, Artificial Sequence
  Description of Artificial Sequence: Synthetic oligonucleotide
aagcaguacaagcagggcu

SEQ ID NO: 791 - RNA, 19 nt, Artificial Sequence
  Description of Artificial Sequence: Synthetic oligonucleotide
agcaguacaagcagggcuu

SEQ ID NO: 792 - RNA, 19 nt, Artificial Sequence
  Description of Artificial Sequence: Synthetic oligonucleotide
gcaguacaagcagggcuuu

SEQ ID NO: 793 - RNA, 19 nt, Artificial Sequence
  Description of Artificial Sequence: Synthetic oligonucleotide
caguacaagcagggcuuug

SEQ ID NO: 794 - RNA, 19 nt, Artificial Sequence
  Description of Artificial Sequence: Synthetic oligonucleotide
aguacaagcagggcuuugg

SEQ ID NO: 795 - RNA, 19 nt, Artificial Sequence
  Description of Artificial Sequence: Synthetic oligonucleotide
guacaagcagggcuuuggc

SEQ ID NO: 796 - RNA, 19 nt, Artificial Sequence
  Description of Artificial Sequence: Synthetic oligonucleotide
uacaagcagggcuuuggca

SEQ ID NO: 797 - RNA, 19 nt, Artificial Sequence
  Description of Artificial Sequence: Synthetic oligonucleotide
acaagcagggcuuuggcag

SEQ ID NO: 798 - RNA, 19 nt, Artificial Sequence
  Description of Artificial Sequence: Synthetic oligonucleotide
caagcagggcuuuggcagc

SEQ ID NO: 799 - RNA, 19 nt, Artificial Sequence
  Description of Artificial Sequence: Synthetic oligonucleotide
aagcagggcuuuggcagca

SEQ ID NO: 800 - RNA, 19 nt, Artificial Sequence
  Description of Artificial Sequence: Synthetic oligonucleotide
agcagggcuuuggcagcau

SEQ ID NO: 801 - RNA, 19 nt, Artificial Sequence
  Description of Artificial Sequence: Synthetic oligonucleotide
gcagggcuuuggcagcauc

SEQ ID NO: 802 - RNA, 19 nt, Artificial Sequence
  Description of Artificial Sequence: Synthetic oligonucleotide
cagggcuuuggcagcaucc

SEQ ID NO: 803 - RNA, 19 nt, Artificial Sequence
  Description of Artificial Sequence: Synthetic oligonucleotide
agggcuuuggcagcauccg

SEQ ID NO: 804 - RNA, 19 nt, Artificial Sequence
  Description of Artificial Sequence: Synthetic oligonucleotide
gggcuuuggcagcauccgu

SEQ ID NO: 805 - RNA, 19 nt, Artificial Sequence
  Description of Artificial Sequence: Synthetic oligonucleotide
ggcuuuggcagcauccgug

SEQ ID NO: 806 - RNA, 19 nt, Artificial Sequence
  Description of Artificial Sequence: Synthetic oligonucleotide
gcuuuggcagcauccgugg

SEQ ID NO: 807 - RNA, 19 nt, Artificial Sequence
  Description of Artificial Sequence: Synthetic oligonucleotide
cuuuggcagcauccguggg

SEQ ID NO: 808 - RNA, 19 nt, Artificial Sequence
  Description of Artificial Sequence: Synthetic oligonucleotide
uuuggcagcauccgugggg

SEQ ID NO: 809 - RNA, 19 nt, Artificial Sequence
  Description of Artificial Sequence: Synthetic oligonucleotide
uuggcagcauccgugggga

SEQ ID NO: 810 - RNA, 19 nt, Artificial Sequence
  Description of Artificial Sequence: Synthetic oligonucleotide
uggcagcauccguggggac

SEQ ID NO: 811 - RNA, 19 nt, Artificial Sequence
  Description of Artificial Sequence: Synthetic oligonucleotide
ggcagcauccguggggacu

SEQ ID NO: 812 - RNA, 19 nt, Artificial Sequence
  Description of Artificial Sequence: Synthetic oligonucleotide
gcagcauccguggggacuu

SEQ ID NO: 813 - RNA, 19 nt, Artificial Sequence
  Description of Artificial Sequence: Synthetic oligonucleotide
cagcauccguggggacuuc

SEQ ID NO: 814 - RNA, 19 nt, Artificial Sequence
  Description of Artificial Sequence: Synthetic oligonucleotide
agcauccguggggacuucu

SEQ ID NO: 815 - RNA, 19 nt, Artificial Sequence
  Description of Artificial Sequence: Synthetic oligonucleotide
gcauccguggggacuucug

SEQ ID NO: 816 - RNA, 19 nt, Artificial Sequence
  Description of Artificial Sequence: Synthetic oligonucleotide
cauccguggggacuucugg

SEQ ID NO: 817 - RNA, 19 nt, Artificial Sequence
  Description of Artificial Sequence: Synthetic oligonucleotide
auccguggggacuucuggc

SEQ ID NO: 818 - RNA, 19 nt, Artificial Sequence
  Description of Artificial Sequence: Synthetic oligonucleotide
uccguggggacuucuggcu

SEQ ID NO: 819 - RNA, 19 nt, Artificial Sequence
  Description of Artificial Sequence: Synthetic oligonucleotide
ccguggggacuucuggcug

SEQ ID NO: 820 - RNA, 19 nt, Artificial Sequence
  Description of Artificial Sequence: Synthetic oligonucleotide
cguggggacuucuggcugg

SEQ ID NO: 821 - RNA, 19 nt, Artificial Sequence
  Description of Artificial Sequence: Synthetic oligonucleotide
guggggacuucuggcuggg

SEQ ID NO: 822 - RNA, 19 nt, Artificial Sequence
  Description of Artificial Sequence: Synthetic oligonucleotide
uggggacuucuggcugggg

SEQ ID NO: 823 - RNA, 19 nt, Artificial Sequence
  Description of Artificial Sequence: Synthetic oligonucleotide
ggggacuucuggcugggga

SEQ ID NO: 824 - RNA, 19 nt, Artificial Sequence
  Description of Artificial Sequence: Synthetic oligonucleotide
gggacuucuggcuggggaa

SEQ ID NO: 825 - RNA, 19 nt, Artificial Sequence
  Description of Artificial Sequence: Synthetic oligonucleotide
ggacuucuggcuggggaac

SEQ ID NO: 826 - RNA, 19 nt, Artificial Sequence
  Description of Artificial Sequence: Synthetic oligonucleotide
gacuucuggcuggggaacg

SEQ ID NO: 827 - RNA, 19 nt, Artificial Sequence
  Description of Artificial Sequence: Synthetic oligonucleotide
acuucuggcuggggaacga

SEQ ID NO: 828 - RNA, 19 nt, Artificial Sequence
  Description of Artificial Sequence: Synthetic oligonucleotide
cuucuggcuggggaacgaa

SEQ ID NO: 829 - RNA, 19 nt, Artificial Sequence
  Description of Artificial Sequence: Synthetic oligonucleotide
uucuggcuggggaacgaac

SEQ ID NO: 830 - RNA, 19 nt, Artificial Sequence
  Description of Artificial Sequence: Synthetic oligonucleotide
ucuggcuggggaacgaaca

SEQ ID NO: 831 - RNA, 19 nt, Artificial Sequence
  Description of Artificial Sequence: Synthetic oligonucleotide
cuggcuggggaacgaacac

SEQ ID NO: 832 - RNA, 19 nt, Artificial Sequence
  Description of Artificial Sequence: Synthetic oligonucleotide
uggcuggggaacgaacaca

SEQ ID NO: 833 - RNA, 19 nt, Artificial Sequence
  Description of Artificial Sequence: Synthetic oligonucleotide
ggcuggggaacgaacacau

SEQ ID NO: 834 - RNA, 19 nt, Artificial Sequence
  Description of Artificial Sequence: Synthetic oligonucleotide
gcuggggaacgaacacauc

SEQ ID NO: 835 - RNA, 19 nt, Artificial Sequence
  Description of Artificial Sequence: Synthetic oligonucleotide
cuggggaacgaacacaucc

SEQ ID NO: 836 - RNA, 19 nt, Artificial Sequence
  Description of Artificial Sequence: Synthetic oligonucleotide
uggggaacgaacacaucca

SEQ ID NO: 837 - RNA, 19 nt, Artificial Sequence
  Description of Artificial Sequence: Synthetic oligonucleotide
ggggaacgaacacauccac

SEQ ID NO: 838 - RNA, 19 nt, Artificial Sequence
  Description of Artificial Sequence: Synthetic oligonucleotide
gggaacgaacacauccacc

SEQ ID NO: 839 - RNA, 19 nt, Artificial Sequence
  Description of Artificial Sequence: Synthetic oligonucleotide
ggaacgaacacauccaccg

SEQ ID NO: 840 - RNA, 19 nt, Artificial Sequence
  Description of Artificial Sequence: Synthetic oligonucleotide
gaacgaacacauccaccgg

SEQ ID NO: 841 - RNA, 19 nt, Artificial Sequence
  Description of Artificial Sequence: Synthetic oligonucleotide
aacgaacacauccaccggc

SEQ ID NO: 842 - RNA, 19 nt, Artificial Sequence
  Description of Artificial Sequence: Synthetic oligonucleotide
acgaacacauccaccggcu

SEQ ID NO: 843 - RNA, 19 nt, Artificial Sequence
  Description of Artificial Sequence: Synthetic oligonucleotide
cgaacacauccaccggcuc

SEQ ID NO: 844 - RNA, 19 nt, Artificial Sequence
  Description of Artificial Sequence: Synthetic oligonucleotide
gaacacauccaccggcucu

SEQ ID NO: 845 - RNA, 19 nt, Artificial Sequence
  Description of Artificial Sequence: Synthetic oligonucleotide
aacacauccaccggcucuc

SEQ ID NO: 846 - RNA, 19 nt, Artificial Sequence
  Description of Artificial Sequence: Synthetic oligonucleotide
acacauccaccggcucucc

SEQ ID NO: 847 - RNA, 19 nt, Artificial Sequence
  Description of Artificial Sequence: Synthetic oligonucleotide
cacauccaccggcucucca

SEQ ID NO: 848 - RNA, 19 nt, Artificial Sequence
  Description of Artificial Sequence: Synthetic oligonucleotide
acauccaccggcucuccag

SEQ ID NO: 849 - RNA, 19 nt, Artificial Sequence
  Description of Artificial Sequence: Synthetic oligonucleotide
cauccaccggcucuccaga

SEQ ID NO: 850 - RNA, 19 nt, Artificial Sequence
  Description of Artificial Sequence: Synthetic oligonucleotide
auccaccggcucuccagac

SEQ ID NO: 851 - RNA, 19 nt, Artificial Sequence
  Description of Artificial Sequence: Synthetic oligonucleotide
uccaccggcucuccagaca

SEQ ID NO: 852 - RNA, 19 nt, Artificial Sequence
  Description of Artificial Sequence: Synthetic oligonucleotide
ccaccggcucuccagacag

SEQ ID NO: 853 - RNA, 19 nt, Artificial Sequence
  Description of Artificial Sequence: Synthetic oligonucleotide
caccggcucuccagacagc

SEQ ID NO: 854 - RNA, 19 nt, Artificial Sequence
  Description of Artificial Sequence: Synthetic oligonucleotide
accggcucuccagacagcc

SEQ ID NO: 855 - RNA, 19 nt, Artificial Sequence
  Description of Artificial Sequence: Synthetic oligonucleotide
ccggcucuccagacagcca

SEQ ID NO: 856 - RNA, 19 nt, Artificial Sequence
  Description of Artificial Sequence: Synthetic oligonucleotide
cggcucuccagacagccaa

SEQ ID NO: 857 - RNA, 19 nt, Artificial Sequence
  Description of Artificial Sequence: Synthetic oligonucleotide
ggcucuccagacagccaac

SEQ ID NO: 858 - RNA, 19 nt, Artificial Sequence
  Description of Artificial Sequence: Synthetic oligonucleotide
gcucuccagacagccaacc

SEQ ID NO: 859 - RNA, 19 nt, Artificial Sequence
  Description of Artificial Sequence: Synthetic oligonucleotide
cucuccagacagccaaccc

SEQ ID NO: 860 - RNA, 19 nt, Artificial Sequence
  Description of Artificial Sequence: Synthetic oligonucleotide
ucuccagacagccaacccg

SEQ ID NO: 861 - RNA, 19 nt, Artificial Sequence
  Description of Artificial Sequence: Synthetic oligonucleotide
cuccagacagccaacccgg

SEQ ID NO: 862 - RNA, 19 nt, Artificial Sequence
  Description of Artificial Sequence: Synthetic oligonucleotide
uccagacagccaacccggc

SEQ ID NO: 863 - RNA, 19 nt, Artificial Sequence
  Description of Artificial Sequence: Synthetic oligonucleotide
ccagacagccaacccggcu

SEQ ID NO: 864 - RNA, 19 nt, Artificial Sequence
  Description of Artificial Sequence: Synthetic oligonucleotide
cagacagccaacccggcug

SEQ ID NO: 865 - RNA, 19 nt, Artificial Sequence
  Description of Artificial Sequence: Synthetic oligonucleotide
agacagccaacccggcugc

SEQ ID NO: 866 - RNA, 19 nt, Artificial Sequence
  Description of Artificial Sequence: Synthetic oligonucleotide
gacagccaacccggcugcg

SEQ ID NO: 867 - RNA, 19 nt, Artificial Sequence
  Description of Artificial Sequence: Synthetic oligonucleotide
acagccaacccggcugcgu

SEQ ID NO: 868 - RNA, 19 nt, Artificial Sequence
  Description of Artificial Sequence: Synthetic oligonucleotide
cagccaacccggcugcgug

SEQ ID NO: 869 - RNA, 19 nt, Artificial Sequence
  Description of Artificial Sequence: Synthetic oligonucleotide
agccaacccggcugcgugu

SEQ ID NO: 870 - RNA, 19 nt, Artificial Sequence
  Description of Artificial Sequence: Synthetic oligonucleotide
gccaacccggcugcgugua

SEQ ID NO: 871 - RNA, 19 nt, Artificial Sequence
  Description of Artificial Sequence: Synthetic oligonucleotide
ccaacccggcugcguguag

SEQ ID NO: 872 - RNA, 19 nt, Artificial Sequence
  Description of Artificial Sequence: Synthetic oligonucleotide
caacccggcugcguguaga

SEQ ID NO: 873 - RNA, 19 nt, Artificial Sequence
  Description of Artificial Sequence: Synthetic oligonucleotide
aacccggcugcguguagag

SEQ ID NO: 874 - RNA, 19 nt, Artificial Sequence
  Description of Artificial Sequence: Synthetic oligonucleotide
acccggcugcguguagaga

SEQ ID NO: 875 - RNA, 19 nt, Artificial Sequence
  Description of Artificial Sequence: Synthetic oligonucleotide
cccggcugcguguagagau

SEQ ID NO: 876 - RNA, 19 nt, Artificial Sequence
  Description of Artificial Sequence: Synthetic oligonucleotide
ccggcugcguguagagaug

SEQ ID NO: 877 - RNA, 19 nt, Artificial Sequence
  Description of Artificial Sequence: Synthetic oligonucleotide
cggcugcguguagagaugg

SEQ ID NO: 878 - RNA, 19 nt, Artificial Sequence
  Description of Artificial Sequence: Synthetic oligonucleotide
ggcugcguguagagaugga

SEQ ID NO: 879 - RNA, 19 nt, Artificial Sequence
  Description of Artificial Sequence: Synthetic oligonucleotide
gcugcguguagagauggag

SEQ ID NO: 880 - RNA, 19 nt, Artificial Sequence
  Description of Artificial Sequence: Synthetic oligonucleotide
cugcguguagagauggagg

SEQ ID NO: 881 - RNA, 19 nt, Artificial Sequence
  Description of Artificial Sequence: Synthetic oligonucleotide
ugcguguagagauggagga

SEQ ID NO: 882 - RNA, 19 nt, Artificial Sequence
  Description of Artificial Sequence: Synthetic oligonucleotide
gcguguagagauggaggac

SEQ ID NO: 883 - RNA, 19 nt, Artificial Sequence
  Description of Artificial Sequence: Synthetic oligonucleotide
cguguagagauggaggacu

SEQ ID NO: 884 - RNA, 19 nt, Artificial Sequence
  Description of Artificial Sequence: Synthetic oligonucleotide
guguagagauggaggacug

SEQ ID NO: 885 - RNA, 19 nt, Artificial Sequence
  Description of Artificial Sequence: Synthetic oligonucleotide
uguagagauggaggacugg

SEQ ID NO: 886 - RNA, 19 nt, Artificial Sequence
  Description of Artificial Sequence: Synthetic oligonucleotide
guagagauggaggacuggg

SEQ ID NO: 887 - RNA, 19 nt, Artificial Sequence
  Description of Artificial Sequence: Synthetic oligonucleotide
uagagauggaggacuggga

SEQ ID NO: 888 - RNA, 19 nt, Artificial Sequence
  Description of Artificial Sequence: Synthetic oligonucleotide
agagauggaggacugggag

SEQ ID NO: 889 - RNA, 19 nt, Artificial Sequence
  Description of Artificial Sequence: Synthetic oligonucleotide
gagauggaggacugggagg

SEQ ID NO: 890 - RNA, 19 nt, Artificial Sequence
  Description of Artificial Sequence: Synthetic oligonucleotide
agauggaggacugggaggg

SEQ ID NO: 891 - RNA, 19 nt, Artificial Sequence
  Description of Artificial Sequence: Synthetic oligonucleotide
gauggaggacugggagggc

SEQ ID NO: 892 - RNA, 19 nt, Artificial Sequence
  Description of Artificial Sequence: Synthetic oligonucleotide
auggaggacugggagggca

SEQ ID NO: 893 - RNA, 19 nt, Artificial Sequence
  Description of Artificial Sequence: Synthetic oligonucleotide
uggaggacugggagggcaa

SEQ ID NO: 894 - RNA, 19 nt, Artificial Sequence
  Description of Artificial Sequence: Synthetic oligonucleotide
ggaggacugggagggcaac

SEQ ID NO: 895 - RNA, 19 nt, Artificial Sequence
  Description of Artificial Sequence: Synthetic oligonucleotide
gaggacugggagggcaacc

SEQ ID NO: 896 - RNA, 19 nt, Artificial Sequence
  Description of Artificial Sequence: Synthetic oligonucleotide
aggacugggagggcaaccu

SEQ ID NO: 897 - RNA, 19 nt, Artificial Sequence
  Description of Artificial Sequence: Synthetic oligonucleotide
ggacugggagggcaaccug

SEQ ID NO: 898 - RNA, 19 nt, Artificial Sequence
  Description of Artificial Sequence: Synthetic oligonucleotide
gacugggagggcaaccugc

SEQ ID NO: 899 - RNA, 19 nt, Artificial Sequence
  Description of Artificial Sequence: Synthetic oligonucleotide
acugggagggcaaccugcg

SEQ ID NO: 900 - RNA, 19 nt, Artificial Sequence
  Description of Artificial Sequence: Synthetic oligonucleotide
cugggagggcaaccugcgc

SEQ ID NO: 901 - RNA, 19 nt, Artificial Sequence
  Description of Artificial Sequence: Synthetic oligonucleotide
ugggagggcaaccugcgcu

SEQ ID NO: 902 - RNA, 19 nt, Artificial Sequence
  Description of Artificial Sequence: Synthetic oligonucleotide
gggagggcaaccugcgcua

SEQ ID NO: 903 - RNA, 19 nt, Artificial Sequence
  Description of Artificial Sequence: Synthetic oligonucleotide
ggagggcaaccugcgcuac

SEQ ID NO: 904 - RNA, 19 nt, Artificial Sequence
  Description of Artificial Sequence: Synthetic oligonucleotide
gagggcaaccugcgcuacg

SEQ ID NO: 905 - RNA, 19 nt, Artificial Sequence
  Description of Artificial Sequence: Synthetic oligonucleotide
agggcaaccugcgcuacgc

SEQ ID NO: 906 - RNA, 19 nt, Artificial Sequence
  Description of Artificial Sequence: Synthetic oligonucleotide
gggcaaccugcgcuacgcu

SEQ ID NO: 907 - RNA, 19 nt, Artificial Sequence
  Description of Artificial Sequence: Synthetic oligonucleotide
ggcaaccugcgcuacgcug

SEQ ID NO: 908 - RNA, 19 nt, Artificial Sequence
  Description of Artificial Sequence: Synthetic oligonucleotide
gcaaccugcgcuacgcuga

SEQ ID NO: 909 - RNA, 19 nt, Artificial Sequence
  Description of Artificial Sequence: Synthetic oligonucleotide
caaccugcgcuacgcugag

SEQ ID NO: 910 - RNA, 19 nt, Artificial Sequence
  Description of Artificial Sequence: Synthetic oligonucleotide
aaccugcgcuacgcugagu

SEQ ID NO: 911 - RNA, 19 nt, Artificial Sequence
  Description of Artificial Sequence: Synthetic oligonucleotide
accugcgcuacgcugagua

SEQ ID NO: 912 - RNA, 19 nt, Artificial Sequence
  Description of Artificial Sequence: Synthetic oligonucleotide
ccugcgcuacgcugaguau

SEQ ID NO: 913 - RNA, 19 nt, Artificial Sequence
  Description of Artificial Sequence: Synthetic oligonucleotide
cugcgcuacgcugaguaua

SEQ ID NO: 914 - RNA, 19 nt, Artificial Sequence
  Description of Artificial Sequence: Synthetic oligonucleotide
ugcgcuacgcugaguauag

SEQ ID NO: 915 - RNA, 19 nt, Artificial Sequence
  Description of Artificial Sequence: Synthetic oligonucleotide
gcgcuacgcugaguauagc

SEQ ID NO: 916 - RNA, 19 nt, Artificial Sequence
  Description of Artificial Sequence: Synthetic oligonucleotide
cgcuacgcugaguauagcc

SEQ ID NO: 917 - RNA, 19 nt, Artificial Sequence
  Description of Artificial Sequence: Synthetic oligonucleotide
gcuacgcugaguauagcca

SEQ ID NO: 918 - RNA, 19 nt, Artificial Sequence
  Description of Artificial Sequence: Synthetic oligonucleotide
cuacgcugaguauagccac

SEQ ID NO: 919 - RNA, 19 nt, Artificial Sequence
  Description of Artificial Sequence: Synthetic oligonucleotide
uacgcugaguauagccacu

SEQ ID NO: 920 - RNA, 19 nt, Artificial Sequence
  Description of Artificial Sequence: Synthetic oligonucleotide
acgcugaguauagccacuu

SEQ ID NO: 921 - RNA, 19 nt, Artificial Sequence
  Description of Artificial Sequence: Synthetic oligonucleotide
cgcugaguauagccacuuu

SEQ ID NO: 922 - RNA, 19 nt, Artificial Sequence
  Description of Artificial Sequence: Synthetic oligonucleotide
gcugaguauagccacuuug

SEQ ID NO: 923 - RNA, 19 nt, Artificial Sequence
  Description of Artificial Sequence: Synthetic oligonucleotide
cugaguauagccacuuugu

SEQ ID NO: 924 - RNA, 19 nt, Artificial Sequence
  Description of Artificial Sequence: Synthetic oligonucleotide
ugaguauagccacuuuguu

SEQ ID NO: 925 - RNA, 19 nt, Artificial Sequence
  Description of Artificial Sequence: Synthetic oligonucleotide
gaguauagccacuuuguuu

SEQ ID NO: 926 - RNA, 19 nt, Artificial Sequence
  Description of Artificial Sequence: Synthetic oligonucleotide
aguauagccacuuuguuuu

SEQ ID NO: 927 - RNA, 19 nt, Artificial Sequence
  Description of Artificial Sequence: Synthetic oligonucleotide
guauagccacuuuguuuug

SEQ ID NO: 928 - RNA, 19 nt, Artificial Sequence
  Description of Artificial Sequence: Synthetic oligonucleotide
uauagccacuuuguuuugg

SEQ ID NO: 929 - RNA, 19 nt, Artificial Sequence
  Description of Artificial Sequence: Synthetic oligonucleotide
auagccacuuuguuuuggg

SEQ ID NO: 930 - RNA, 19 nt, Artificial Sequence
  Description of Artificial Sequence: Synthetic oligonucleotide
uagccacuuuguuuugggc

SEQ ID NO: 931 - RNA, 19 nt, Artificial Sequence
  Description of Artificial Sequence: Synthetic oligonucleotide
agccacuuuguuuugggca

SEQ ID NO: 932 - RNA, 19 nt, Artificial Sequence
  Description of Artificial Sequence: Synthetic oligonucleotide
gccacuuuguuuugggcaa

SEQ ID NO: 933 - RNA, 19 nt, Artificial Sequence
  Description of Artificial Sequence: Synthetic oligonucleotide
ccacuuuguuuugggcaau

SEQ ID NO: 934 - RNA, 19 nt, Artificial Sequence
  Description of Artificial Sequence: Synthetic oligonucleotide
cacuuuguuuugggcaaug

SEQ ID NO: 935 - RNA, 19 nt, Artificial Sequence
  Description of Artificial Sequence: Synthetic oligonucleotide
acuuuguuuugggcaauga

SEQ ID NO: 936 - RNA, 19 nt, Artificial Sequence
  Description of Artificial Sequence: Synthetic oligonucleotide
cuuuguuuugggcaaugaa

SEQ ID NO: 937 - RNA, 19 nt, Artificial Sequence
  Description of Artificial Sequence: Synthetic oligonucleotide
uuuguuuugggcaaugaac

SEQ ID NO: 938 - RNA, 19 nt, Artificial Sequence
  Description of Artificial Sequence: Synthetic oligonucleotide
uuguuuugggcaaugaacu

SEQ ID NO: 939 - RNA, 19 nt, Artificial Sequence
  Description of Artificial Sequence: Synthetic oligonucleotide
uguuuugggcaaugaacuc

SEQ ID NO: 940 - RNA, 19 nt, Artificial Sequence
  Description of Artificial Sequence: Synthetic oligonucleotide
guuuugggcaaugaacuca

SEQ ID NO: 941 - RNA, 19 nt, Artificial Sequence
  Description of Artificial Sequence: Synthetic oligonucleotide
uuuugggcaaugaacucaa

SEQ ID NO: 942 - RNA, 19 nt, Artificial Sequence
  Description of Artificial Sequence: Synthetic oligonucleotide
uuugggcaaugaacucaac

SEQ ID NO: 943 - RNA, 19 nt, Artificial Sequence
  Description of Artificial Sequence: Synthetic oligonucleotide
uugggcaaugaacucaaca

SEQ ID NO: 944 - RNA, 19 nt, Artificial Sequence
  Description of Artificial Sequence: Synthetic oligonucleotide
ugggcaaugaacucaacag

SEQ ID NO: 945 - RNA, 19 nt, Artificial Sequence
  Description of Artificial Sequence: Synthetic oligonucleotide
gggcaaugaacucaacagc

SEQ ID NO: 946 - RNA, 19 nt, Artificial Sequence
  Description of Artificial Sequence: Synthetic oligonucleotide
ggcaaugaacucaacagcu

SEQ ID NO: 947 - RNA, 19 nt, Artificial Sequence
  Description of Artificial Sequence: Synthetic oligonucleotide
gcaaugaacucaacagcua

SEQ ID NO: 948 - RNA, 19 nt, Artificial Sequence
  Description of Artificial Sequence: Synthetic oligonucleotide
caaugaacucaacagcuau

SEQ ID NO: 949 - RNA, 19 nt, Artificial Sequence
  Description of Artificial Sequence: Synthetic oligonucleotide
aaugaacucaacagcuauc

SEQ ID NO: 950 - RNA, 19 nt, Artificial Sequence
  Description of Artificial Sequence: Synthetic oligonucleotide
augaacucaacagcuaucg

SEQ ID NO: 951 - RNA, 19 nt, Artificial Sequence
  Description of Artificial Sequence: Synthetic oligonucleotide
ugaacucaacagcuaucgc

SEQ ID NO: 952 - RNA, 19 nt, Artificial Sequence
  Description of Artificial Sequence: Synthetic oligonucleotide
gaacucaacagcuaucgcc

SEQ ID NO: 953 - RNA, 19 nt, Artificial Sequence
  Description of Artificial Sequence: Synthetic oligonucleotide
aacucaacagcuaucgccu

SEQ ID NO: 954 - RNA, 19 nt, Artificial Sequence
  Description of Artificial Sequence: Synthetic oligonucleotide
acucaacagcuaucgccuc

SEQ ID NO: 955 - RNA, 19 nt, Artificial Sequence
  Description of Artificial Sequence: Synthetic oligonucleotide
cucaacagcuaucgccucu

SEQ ID NO: 956 - RNA, 19 nt, Artificial Sequence
  Description of Artificial Sequence: Synthetic oligonucleotide
ucaacagcuaucgccucuu

SEQ ID NO: 957 - RNA, 19 nt, Artificial Sequence
  Description of Artificial Sequence: Synthetic oligonucleotide
caacagcuaucgccucuuc

SEQ ID NO: 958 - RNA, 19 nt, Artificial Sequence
  Description of Artificial Sequence: Synthetic oligonucleotide
aacagcuaucgccucuucc

SEQ ID NO: 959 - RNA, 19 nt, Artificial Sequence
  Description of Artificial Sequence: Synthetic oligonucleotide
acagcuaucgccucuuccu

SEQ ID NO: 960 - RNA, 19 nt, Artificial Sequence
  Description of Artificial Sequence: Synthetic oligonucleotide
cagcuaucgccucuuccug

SEQ ID NO: 961 - RNA, 19 nt, Artificial Sequence
  Description of Artificial Sequence: Synthetic oligonucleotide
agcuaucgccucuuccugg

SEQ ID NO: 962 - RNA, 19 nt, Artificial Sequence
  Description of Artificial Sequence: Synthetic oligonucleotide
gcuaucgccucuuccuggg

SEQ ID NO: 963 - RNA, 19 nt, Artificial Sequence
  Description of Artificial Sequence: Synthetic oligonucleotide
cuaucgccucuuccugggg

SEQ ID NO: 964 - RNA, 19 nt, Artificial Sequence
  Description of Artificial Sequence: Synthetic oligonucleotide
uaucgccucuuccugggga

SEQ ID NO: 965 - RNA, 19 nt, Artificial Sequence
  Description of Artificial Sequence: Synthetic oligonucleotide
aucgccucuuccuggggaa

SEQ ID NO: 966 - RNA, 19 nt, Artificial Sequence
  Description of Artificial Sequence: Synthetic oligonucleotide
ucgccucuuccuggggaac

SEQ ID NO: 967 - RNA, 19 nt, Artificial Sequence
  Description of Artificial Sequence: Synthetic oligonucleotide
cgccucuuccuggggaacu

SEQ ID NO: 968 - RNA, 19 nt, Artificial Sequence
  Description of Artificial Sequence: Synthetic oligonucleotide
gccucuuccuggggaacua

SEQ ID NO: 969 - RNA, 19 nt, Artificial Sequence
  Description of Artificial Sequence: Synthetic oligonucleotide
ccucuuccuggggaacuac

SEQ ID NO: 970 - RNA, 19 nt, Artificial Sequence
  Description of Artificial Sequence: Synthetic oligonucleotide
cucuuccuggggaacuaca

SEQ ID NO: 971 - RNA, 19 nt, Artificial Sequence
  Description of Artificial Sequence: Synthetic oligonucleotide
ucuuccuggggaacuacac

SEQ ID NO: 972 - RNA, 19 nt, Artificial Sequence
  Description of Artificial Sequence: Synthetic oligonucleotide
cuuccuggggaacuacacu

SEQ ID NO: 973 - RNA, 19 nt, Artificial Sequence
  Description of Artificial Sequence: Synthetic oligonucleotide
uuccuggggaacuacacug

SEQ ID NO: 974 - RNA, 19 nt, Artificial Sequence
  Description of Artificial Sequence: Synthetic oligonucleotide
uccuggggaacuacacugg

SEQ ID NO: 975 - RNA, 19 nt, Artificial Sequence
  Description of Artificial Sequence: Synthetic oligonucleotide
ccuggggaacuacacuggc

SEQ ID NO: 976 - RNA, 19 nt, Artificial Sequence
  Description of Artificial Sequence: Synthetic oligonucleotide
cuggggaacuacacuggca

SEQ ID NO: 977 - RNA, 19 nt, Artificial Sequence
  Description of Artificial Sequence: Synthetic oligonucleotide
uggggaacuacacuggcaa

SEQ ID NO: 978 - RNA, 19 nt, Artificial Sequence
  Description of Artificial Sequence: Synthetic oligonucleotide
ggggaacuacacuggcaau

SEQ ID NO: 979 - RNA, 19 nt, Artificial Sequence
  Description of Artificial Sequence: Synthetic oligonucleotide
gggaacuacacuggcaaug

SEQ ID NO: 980 - RNA, 19 nt, Artificial Sequence
  Description of Artificial Sequence: Synthetic oligonucleotide
ggaacuacacuggcaaugu

SEQ ID NO: 981 - RNA, 19 nt, Artificial Sequence
  Description of Artificial Sequence: Synthetic oligonucleotide
gaacuacacuggcaaugug

SEQ ID NO: 982 - RNA, 19 nt, Artificial Sequence
  Description of Artificial Sequence: Synthetic oligonucleotide
aacuacacuggcaaugugg

SEQ ID NO: 983 - RNA, 19 nt, Artificial Sequence
  Description of Artificial Sequence: Synthetic oligonucleotide
acuacacuggcaauguggg

SEQ ID NO: 984 - RNA, 19 nt, Artificial Sequence
  Description of Artificial Sequence: Synthetic oligonucleotide
cuacacuggcaaugugggg

SEQ ID NO: 985 - RNA, 19 nt, Artificial Sequence
  Description of Artificial Sequence: Synthetic oligonucleotide
uacacuggcaaugugggga

SEQ ID NO: 986 - RNA, 19 nt, Artificial Sequence
  Description of Artificial Sequence: Synthetic oligonucleotide
acacuggcaauguggggaa

SEQ ID NO: 987 - RNA, 19 nt, Artificial Sequence
  Description of Artificial Sequence: Synthetic oligonucleotide
cacuggcaauguggggaac

SEQ ID NO: 988 - RNA, 19 nt, Artificial Sequence
  Description of Artificial Sequence: Synthetic oligonucleotide
acuggcaauguggggaacg

SEQ ID NO: 989 - RNA, 19 nt, Artificial Sequence
  Description of Artificial Sequence: Synthetic oligonucleotide
cuggcaauguggggaacga

SEQ ID NO: 990 - RNA, 19 nt, Artificial Sequence
  Description of Artificial Sequence: Synthetic oligonucleotide
uggcaauguggggaacgac

SEQ ID NO: 991 - RNA, 19 nt, Artificial Sequence
  Description of Artificial Sequence: Synthetic oligonucleotide
ggcaauguggggaacgacg

SEQ ID NO: 992 - RNA, 19 nt, Artificial Sequence
  Description of Artificial Sequence: Synthetic oligonucleotide
gcaauguggggaacgacgc

SEQ ID NO: 993 - RNA, 19 nt, Artificial Sequence
  Description of Artificial Sequence: Synthetic oligonucleotide
caauguggggaacgacgcc

SEQ ID NO: 994 - RNA, 19 nt, Artificial Sequence
  Description of Artificial Sequence: Synthetic oligonucleotide
aauguggggaacgacgccc

SEQ ID NO: 995 - RNA, 19 nt, Artificial Sequence
  Description of Artificial Sequence: Synthetic oligonucleotide
auguggggaacgacgcccu

SEQ ID NO: 996 - RNA, 19 nt, Artificial Sequence
  Description of Artificial Sequence: Synthetic oligonucleotide
uguggggaacgacgcccuc

SEQ ID NO: 997 - RNA, 19 nt, Artificial Sequence
  Description of Artificial Sequence: Synthetic oligonucleotide
guggggaacgacgcccucc

SEQ ID NO: 998 - RNA, 19 nt, Artificial Sequence
  Description of Artificial Sequence: Synthetic oligonucleotide
uggggaacgacgcccucca

SEQ ID NO: 999 - RNA, 19 nt, Artificial Sequence
  Description of Artificial Sequence: Synthetic oligonucleotide
ggggaacgacgcccuccag

SEQ ID NO: 1000 - RNA, 19 nt, Artificial Sequence
  Description of Artificial Sequence: Synthetic oligonucleotide
gggaacgacgcccuccagu

SEQ ID NO: 1001 - RNA, 19 nt, Artificial Sequence
  Description of Artificial Sequence: Synthetic oligonucleotide
ggaacgacgcccuccagua

SEQ ID NO: 1002 - RNA, 19 nt, Artificial Sequence
  Description of Artificial Sequence: Synthetic oligonucleotide
gaacgacgcccuccaguau

SEQ ID NO: 1003 - RNA, 19 nt, Artificial Sequence
  Description of Artificial Sequence: Synthetic oligonucleotide
aacgacgcccuccaguauc

SEQ ID NO: 1004 - RNA, 19 nt, Artificial Sequence
  Description of Artificial Sequence: Synthetic oligonucleotide
acgacgcccuccaguauca

SEQ ID NO: 1005 - RNA, 19 nt, Artificial Sequence
  Description of Artificial Sequence: Synthetic oligonucleotide
cgacgcccuccaguaucau

SEQ ID NO: 1006 - RNA, 19 nt, Artificial Sequence
  Description of Artificial Sequence: Synthetic oligonucleotide
gacgcccuccaguaucaua

SEQ ID NO: 1007 - RNA, 19 nt, Artificial Sequence
  Description of Artificial Sequence: Synthetic oligonucleotide
acgcccuccaguaucauaa

SEQ ID NO: 1008 - RNA, 19 nt, Artificial Sequence
  Description of Artificial Sequence: Synthetic oligonucleotide
cgcccuccaguaucauaac

SEQ ID NO: 1009 - RNA, 19 nt, Artificial Sequence
  Description of Artificial Sequence: Synthetic oligonucleotide
gcccuccaguaucauaaca

SEQ ID NO: 1010 - RNA, 19 nt, Artificial Sequence
  Description of Artificial Sequence: Synthetic oligonucleotide
cccuccaguaucauaacaa

SEQ ID NO: 1011 - RNA, 19 nt, Artificial Sequence
  Description of Artificial Sequence: Synthetic oligonucleotide
ccuccaguaucauaacaac

SEQ ID NO: 1012 - RNA, 19 nt, Artificial Sequence
  Description of Artificial Sequence: Synthetic oligonucleotide
cuccaguaucauaacaaca

SEQ ID NO: 1013 - RNA, 19 nt, Artificial Sequence
  Description of Artificial Sequence: Synthetic oligonucleotide
uccaguaucauaacaacac

SEQ ID NO: 1014 - RNA, 19 nt, Artificial Sequence
  Description of Artificial Sequence: Synthetic oligonucleotide
ccaguaucauaacaacaca

SEQ ID NO: 1015 - RNA, 19 nt, Artificial Sequence
  Description of Artificial Sequence: Synthetic oligonucleotide
caguaucauaacaacacag

SEQ ID NO: 1016 - RNA, 19 nt, Artificial Sequence
  Description of Artificial Sequence: Synthetic oligonucleotide
aguaucauaacaacacagc

SEQ ID NO: 1017 - RNA, 19 nt, Artificial Sequence
  Description of Artificial Sequence: Synthetic oligonucleotide
guaucauaacaacacagcc

SEQ ID NO: 1018 - RNA, 19 nt, Artificial Sequence
  Description of Artificial Sequence: Synthetic oligonucleotide
uaucauaacaacacagccu

SEQ ID NO: 1019 - RNA, 19 nt, Artificial Sequence
  Description of Artificial Sequence: Synthetic oligonucleotide
aucauaacaacacagccuu

SEQ ID NO: 1020 - RNA, 19 nt, Artificial Sequence
  Description of Artificial Sequence: Synthetic oligonucleotide
ucauaacaacacagccuuc

SEQ ID NO: 1021 - RNA, 19 nt, Artificial Sequence
  Description of Artificial Sequence: Synthetic oligonucleotide
cauaacaacacagccuuca

SEQ ID NO: 1022 - RNA, 19 nt, Artificial Sequence
  Description of Artificial Sequence: Synthetic oligonucleotide
auaacaacacagccuucag

SEQ ID NO: 1023 - RNA, 19 nt, Artificial Sequence
  Description of Artificial Sequence: Synthetic oligonucleotide
uaacaacacagccuucagc

SEQ ID NO: 1024 - RNA, 19 nt, Artificial Sequence
  Description of Artificial Sequence: Synthetic oligonucleotide
aacaacacagccuucagca

SEQ ID NO: 1025 - RNA, 19 nt, Artificial Sequence
  Description of Artificial Sequence: Synthetic oligonucleotide
acaacacagccuucagcac

SEQ ID NO: 1026 - RNA, 19 nt, Artificial Sequence
  Description of Artificial Sequence: Synthetic oligonucleotide
caacacagccuucagcacc

SEQ ID NO: 1027 - RNA, 19 nt, Artificial Sequence
  Description of Artificial Sequence: Synthetic oligonucleotide
aacacagccuucagcacca

SEQ ID NO: 1028 - RNA, 19 nt, Artificial Sequence
  Description of Artificial Sequence: Synthetic oligonucleotide
acacagccuucagcaccaa

SEQ ID NO: 1029 - RNA, 19 nt, Artificial Sequence
  Description of Artificial Sequence: Synthetic oligonucleotide
cacagccuucagcaccaag

SEQ ID NO: 1030 - RNA, 19 nt, Artificial Sequence
  Description of Artificial Sequence: Synthetic oligonucleotide
acagccuucagcaccaagg

SEQ ID NO: 1031 - RNA, 19 nt, Artificial Sequence
  Description of Artificial Sequence: Synthetic oligonucleotide
cagccuucagcaccaagga

SEQ ID NO: 1032 - RNA, 19 nt, Artificial Sequence
  Description of Artificial Sequence: Synthetic oligonucleotide
agccuucagcaccaaggac

SEQ ID NO: 1033 - RNA, 19 nt, Artificial Sequence
  Description of Artificial Sequence: Synthetic oligonucleotide
gccuucagcaccaaggaca

SEQ ID NO: 1034 - RNA, 19 nt, Artificial Sequence
  Description of Artificial Sequence: Synthetic oligonucleotide
ccuucagcaccaaggacaa

SEQ ID NO: 1035 - RNA, 19 nt, Artificial Sequence
  Description of Artificial Sequence: Synthetic oligonucleotide
cuucagcaccaaggacaag

SEQ ID NO: 1036 - RNA, 19 nt, Artificial Sequence
  Description of Artificial Sequence: Synthetic oligonucleotide
uucagcaccaaggacaagg

SEQ ID NO: 1037 - RNA, 19 nt, Artificial Sequence
  Description of Artificial Sequence: Synthetic oligonucleotide
ucagcaccaaggacaagga

SEQ ID NO: 1038 - RNA, 19 nt, Artificial Sequence
  Description of Artificial Sequence: Synthetic oligonucleotide
cagcaccaaggacaaggac

SEQ ID NO: 1039 - RNA, 19 nt, Artificial Sequence
  Description of Artificial Sequence: Synthetic oligonucleotide
agcaccaaggacaaggaca

SEQ ID NO: 1040 - RNA, 19 nt, Artificial Sequence
  Description of Artificial Sequence: Synthetic oligonucleotide
gcaccaaggacaaggacaa

SEQ ID NO: 1041 - RNA, 19 nt, Artificial Sequence
  Description of Artificial Sequence: Synthetic oligonucleotide
caccaaggacaaggacaau

SEQ ID NO: 1042 - RNA, 19 nt, Artificial Sequence
  Description of Artificial Sequence: Synthetic oligonucleotide
accaaggacaaggacaaug

SEQ ID NO: 1043 - RNA, 19 nt, Artificial Sequence
  Description of Artificial Sequence: Synthetic oligonucleotide
ccaaggacaaggacaauga

SEQ ID NO: 1044 - RNA, 19 nt, Artificial Sequence
  Description of Artificial Sequence: Synthetic oligonucleotide
caaggacaaggacaaugac

SEQ ID NO: 1045 - RNA, 19 nt, Artificial Sequence
  Description of Artificial Sequence: Synthetic oligonucleotide
aaggacaaggacaaugaca

SEQ ID NO: 1046 - RNA, 19 nt, Artificial Sequence
  Description of Artificial Sequence: Synthetic oligonucleotide
aggacaaggacaaugacaa

SEQ ID NO: 1047 - RNA, 19 nt, Artificial Sequence
  Description of Artificial Sequence: Synthetic oligonucleotide
ggacaaggacaaugacaac

SEQ ID NO: 1048 - RNA, 19 nt, Artificial Sequence
  Description of Artificial Sequence: Synthetic oligonucleotide
gacaaggacaaugacaacu

SEQ ID NO: 1049 - RNA, 19 nt, Artificial Sequence
  Description of Artificial Sequence: Synthetic oligonucleotide
acaaggacaaugacaacug

SEQ ID NO: 1050 - RNA, 19 nt, Artificial Sequence
  Description of Artificial Sequence: Synthetic oligonucleotide
caaggacaaugacaacugc

SEQ ID NO: 1051 - RNA, 19 nt, Artificial Sequence
  Description of Artificial Sequence: Synthetic oligonucleotide
aaggacaaugacaacugcu

SEQ ID NO: 1052 - RNA, 19 nt, Artificial Sequence
  Description of Artificial Sequence: Synthetic oligonucleotide
aggacaaugacaacugcuu

SEQ ID NO: 1053 - RNA, 19 nt, Artificial Sequence
  Description of Artificial Sequence: Synthetic oligonucleotide
ggacaaugacaacugcuug

SEQ ID NO: 1054 - RNA, 19 nt, Artificial Sequence
  Description of Artificial Sequence: Synthetic oligonucleotide
gacaaugacaacugcuugg

SEQ ID NO: 1055 - RNA, 19 nt, Artificial Sequence
  Description of Artificial Sequence: Synthetic oligonucleotide
acaaugacaacugcuugga

SEQ ID NO: 1056 - RNA, 19 nt, Artificial Sequence
  Description of Artificial Sequence: Synthetic oligonucleotide
caaugacaacugcuuggac

SEQ ID NO: 1057 - RNA, 19 nt, Artificial Sequence
  Description of Artificial Sequence: Synthetic oligonucleotide
aaugacaacugcuuggaca

SEQ ID NO: 1058 - RNA, 19 nt, Artificial Sequence
  Description of Artificial Sequence: Synthetic oligonucleotide
augacaacugcuuggacaa

SEQ ID NO: 1059 - RNA, 19 nt, Artificial Sequence
  Description of Artificial Sequence: Synthetic oligonucleotide
ugacaacugcuuggacaag

SEQ ID NO: 1060 - RNA, 19 nt, Artificial Sequence
  Description of Artificial Sequence: Synthetic oligonucleotide
gacaacugcuuggacaagu

SEQ ID NO: 1061 - RNA, 19 nt, Artificial Sequence
  Description of Artificial Sequence: Synthetic oligonucleotide
acaacugcuuggacaagug

SEQ ID NO: 1062 - RNA, 19 nt, Artificial Sequence
  Description of Artificial Sequence: Synthetic oligonucleotide
caacugcuuggacaagugu

SEQ ID NO: 1063 - RNA, 19 nt, Artificial Sequence
  Description of Artificial Sequence: Synthetic oligonucleotide
aacugcuuggacaagugug

SEQ ID NO: 1064 - RNA, 19 nt, Artificial Sequence
  Description of Artificial Sequence: Synthetic oligonucleotide
acugcuuggacaagugugc

SEQ ID NO: 1065 - RNA, 19 nt, Artificial Sequence
  Description of Artificial Sequence: Synthetic oligonucleotide
cugcuuggacaagugugca

SEQ ID NO: 1066 - RNA, 19 nt, Artificial Sequence
  Description of Artificial Sequence: Synthetic oligonucleotide
ugcuuggacaagugugcac

SEQ ID NO: 1067 - RNA, 19 nt, Artificial Sequence
  Description of Artificial Sequence: Synthetic oligonucleotide
gcuuggacaagugugcaca

SEQ ID NO: 1068 - RNA, 19 nt, Artificial Sequence
  Description of Artificial Sequence: Synthetic oligonucleotide
cuuggacaagugugcacag

SEQ ID NO: 1069 - RNA, 19 nt, Artificial Sequence
  Description of Artificial Sequence: Synthetic oligonucleotide
uuggacaagugugcacagc

SEQ ID NO: 1070 - RNA, 19 nt, Artificial Sequence
  Description of Artificial Sequence: Synthetic oligonucleotide
uggacaagugugcacagcu

SEQ ID NO: 1071 - RNA, 19 nt, Artificial Sequence
  Description of Artificial Sequence: Synthetic oligonucleotide
ggacaagugugcacagcuc

SEQ ID NO: 1072 - RNA, 19 nt, Artificial Sequence
  Description of Artificial Sequence: Synthetic oligonucleotide
gacaagugugcacagcucc

SEQ ID NO: 1073 - RNA, 19 nt, Artificial Sequence
  Description of Artificial Sequence: Synthetic oligonucleotide
acaagugugcacagcuccg

SEQ ID NO: 1074 - RNA, 19 nt, Artificial Sequence
  Description of Artificial Sequence: Synthetic oligonucleotide
caagugugcacagcuccgc

SEQ ID NO: 1075 - RNA, 19 nt, Artificial Sequence
  Description of Artificial Sequence: Synthetic oligonucleotide
aagugugcacagcuccgca

SEQ ID NO: 1076 - RNA, 19 nt, Artificial Sequence
  Description of Artificial Sequence: Synthetic oligonucleotide
agugugcacagcuccgcaa

SEQ ID NO: 1077 - RNA, 19 nt, Artificial Sequence
  Description of Artificial Sequence: Synthetic oligonucleotide
gugugcacagcuccgcaaa

SEQ ID NO: 1078 - RNA, 19 nt, Artificial Sequence
  Description of Artificial Sequence: Synthetic oligonucleotide
ugugcacagcuccgcaaag

SEQ ID NO: 1079 - RNA, 19 nt, Artificial Sequence
  Description of Artificial Sequence: Synthetic oligonucleotide
gugcacagcuccgcaaagg

SEQ ID NO: 1080 - RNA, 19 nt, Artificial Sequence
  Description of Artificial Sequence: Synthetic oligonucleotide
ugcacagcuccgcaaaggu

SEQ ID NO: 1081 - RNA, 19 nt, Artificial Sequence
  Description of Artificial Sequence: Synthetic oligonucleotide
gcacagcuccgcaaaggug

SEQ ID NO: 1082 - RNA, 19 nt, Artificial Sequence
  Description of Artificial Sequence: Synthetic oligonucleotide
cacagcuccgcaaaggugg

SEQ ID NO: 1083 - RNA, 19 nt, Artificial Sequence
  Description of Artificial Sequence: Synthetic oligonucleotide
acagcuccgcaaagguggc

SEQ ID NO: 1084 - RNA, 19 nt, Artificial Sequence
  Description of Artificial Sequence: Synthetic oligonucleotide
cagcuccgcaaagguggcu

SEQ ID NO: 1085 - RNA, 19 nt, Artificial Sequence
  Description of Artificial Sequence: Synthetic oligonucleotide
agcuccgcaaagguggcua

SEQ ID NO: 1086 - RNA, 19 nt, Artificial Sequence
  Description of Artificial Sequence: Synthetic oligonucleotide
gcuccgcaaagguggcuac

SEQ ID NO: 1087 - RNA, 19 nt, Artificial Sequence
  Description of Artificial Sequence: Synthetic oligonucleotide
cuccgcaaagguggcuacu

SEQ ID NO: 1088 - RNA, 19 nt, Artificial Sequence
  Description of Artificial Sequence: Synthetic oligonucleotide
uccgcaaagguggcuacug

SEQ ID NO: 1089 - RNA, 19 nt, Artificial Sequence
  Description of Artificial Sequence: Synthetic oligonucleotide
ccgcaaagguggcuacugg

SEQ ID NO: 1090 - RNA, 19 nt, Artificial Sequence
  Description of Artificial Sequence: Synthetic oligonucleotide
cgcaaagguggcuacuggu

SEQ ID NO: 1091 - RNA, 19 nt, Artificial Sequence
  Description of Artificial Sequence: Synthetic oligonucleotide
gcaaagguggcuacuggua

SEQ ID NO: 1092 - RNA, 19 nt, Artificial Sequence
  Description of Artificial Sequence: Synthetic oligonucleotide
caaagguggcuacugguac

SEQ ID NO: 1093 - RNA, 19 nt, Artificial Sequence
  Description of Artificial Sequence: Synthetic oligonucleotide
aaagguggcuacugguaca

SEQ ID NO: 1094 - RNA, 19 nt, Artificial Sequence
  Description of Artificial Sequence: Synthetic oligonucleotide
aagguggcuacugguacaa

SEQ ID NO: 1095 - RNA, 19 nt, Artificial Sequence
  Description of Artificial Sequence: Synthetic oligonucleotide
agguggcuacugguacaac

SEQ ID NO: 1096 - RNA, 19 nt, Artificial Sequence
  Description of Artificial Sequence: Synthetic oligonucleotide
gguggcuacugguacaacu

SEQ ID NO: 1097 - RNA, 19 nt, Artificial Sequence
  Description of Artificial Sequence: Synthetic oligonucleotide
guggcuacugguacaacug

SEQ ID NO: 1098 - RNA, 19 nt, Artificial Sequence
  Description of Artificial Sequence: Synthetic oligonucleotide
uggcuacugguacaacugc

SEQ ID NO: 1099 - RNA, 19 nt, Artificial Sequence
  Description of Artificial Sequence: Synthetic oligonucleotide
ggcuacugguacaacugcu

SEQ ID NO: 1100 - RNA, 19 nt, Artificial Sequence
  Description of Artificial Sequence: Synthetic oligonucleotide
gcuacugguacaacugcug

SEQ ID NO: 1101 - RNA, 19 nt, Artificial Sequence
  Description of Artificial Sequence: Synthetic oligonucleotide
cuacugguacaacugcugc

SEQ ID NO: 1102 - RNA, 19 nt, Artificial Sequence
  Description of Artificial Sequence: Synthetic oligonucleotide
uacugguacaacugcugca

SEQ ID NO: 1103 - RNA, 19 nt, Artificial Sequence
  Description of Artificial Sequence: Synthetic oligonucleotide
acugguacaacugcugcac

SEQ ID NO: 1104 - RNA, 19 nt, Artificial Sequence
  Description of Artificial Sequence: Synthetic oligonucleotide
cugguacaacugcugcaca

SEQ ID NO: 1105 - RNA, 19 nt, Artificial Sequence
  Description of Artificial Sequence: Synthetic oligonucleotide
ugguacaacugcugcacag

SEQ ID NO: 1106 - RNA, 19 nt, Artificial Sequence
  Description of Artificial Sequence: Synthetic oligonucleotide
gguacaacugcugcacaga

SEQ ID NO: 1107 - RNA, 19 nt, Artificial Sequence
  Description of Artificial Sequence: Synthetic oligonucleotide
guacaacugcugcacagac

SEQ ID NO: 1108 - RNA, 19 nt, Artificial Sequence
  Description of Artificial Sequence: Synthetic oligonucleotide
uacaacugcugcacagacu

SEQ ID NO: 1109 - RNA, 19 nt, Artificial Sequence
  Description of Artificial Sequence: Synthetic oligonucleotide
acaacugcugcacagacuc

SEQ ID NO: 1110 - RNA, 19 nt, Artificial Sequence
  Description of Artificial Sequence: Synthetic oligonucleotide
caacugcugcacagacucc

SEQ ID NO: 1111 - RNA, 19 nt, Artificial Sequence
  Description of Artificial Sequence: Synthetic oligonucleotide
aacugcugcacagacucca

SEQ ID NO: 1112 - RNA, 19 nt, Artificial Sequence
  Description of Artificial Sequence: Synthetic oligonucleotide
acugcugcacagacuccaa

SEQ ID NO: 1113 - RNA, 19 nt, Artificial Sequence
  Description of Artificial Sequence: Synthetic oligonucleotide
cugcugcacagacuccaac

SEQ ID NO: 1114 - RNA, 19 nt, Artificial Sequence
  Description of Artificial Sequence: Synthetic oligonucleotide
ugcugcacagacuccaacc

SEQ ID NO: 1115 - RNA, 19 nt, Artificial Sequence
  Description of Artificial Sequence: Synthetic oligonucleotide
gcugcacagacuccaaccu

SEQ ID NO: 1116 - RNA, 19 nt, Artificial Sequence
  Description of Artificial Sequence: Synthetic oligonucleotide
cugcacagacuccaaccuc

SEQ ID NO: 1117 - RNA, 19 nt, Artificial Sequence
  Description of Artificial Sequence: Synthetic oligonucleotide
ugcacagacuccaaccuca

SEQ ID NO: 1118 - RNA, 19 nt, Artificial Sequence
  Description of Artificial Sequence: Synthetic oligonucleotide
gcacagacuccaaccucaa

SEQ ID NO: 1119 - RNA, 19 nt, Artificial Sequence
  Description of Artificial Sequence: Synthetic oligonucleotide
cacagacuccaaccucaau

SEQ ID NO: 1120 - RNA, 19 nt, Artificial Sequence
  Description of Artificial Sequence: Synthetic oligonucleotide
acagacuccaaccucaaug

SEQ ID NO: 1121 - RNA, 19 nt, Artificial Sequence
  Description of Artificial Sequence: Synthetic oligonucleotide
cagacuccaaccucaaugg

SEQ ID NO: 1122 - RNA, 19 nt, Artificial Sequence
  Description of Artificial Sequence: Synthetic oligonucleotide
agacuccaaccucaaugga

SEQ ID NO: 1123 - RNA, 19 nt, Artificial Sequence
  Description of Artificial Sequence: Synthetic oligonucleotide
gacuccaaccucaauggag

SEQ ID NO: 1124 - RNA, 19 nt, Artificial Sequence
  Description of Artificial Sequence: Synthetic oligonucleotide
acuccaaccucaauggagu

SEQ ID NO: 1125 - RNA, 19 nt, Artificial Sequence
  Description of Artificial Sequence: Synthetic oligonucleotide
cuccaaccucaauggagug

SEQ ID NO: 1126 - RNA, 19 nt, Artificial Sequence
  Description of Artificial Sequence: Synthetic oligonucleotide
uccaaccucaauggagugu

SEQ ID NO: 1127 - RNA, 19 nt, Artificial Sequence
  Description of Artificial Sequence: Synthetic oligonucleotide
ccaaccucaauggagugua

SEQ ID NO: 1128 - RNA, 19 nt, Artificial Sequence
  Description of Artificial Sequence: Synthetic oligonucleotide
caaccucaauggaguguac

SEQ ID NO: 1129 - RNA, 19 nt, Artificial Sequence
  Description of Artificial Sequence: Synthetic oligonucleotide
aaccucaauggaguguacu

SEQ ID NO: 1130 - RNA, 19 nt, Artificial Sequence
  Description of Artificial Sequence: Synthetic oligonucleotide
accucaauggaguguacua

SEQ ID NO: 1131 - RNA, 19 nt, Artificial Sequence
  Description of Artificial Sequence: Synthetic oligonucleotide
ccucaauggaguguacuac

SEQ ID NO: 1132 - RNA, 19 nt, Artificial Sequence
  Description of Artificial Sequence: Synthetic oligonucleotide
cucaauggaguguacuacc

SEQ ID NO: 1133 - RNA, 19 nt, Artificial Sequence
  Description of Artificial Sequence: Synthetic oligonucleotide
ucaauggaguguacuaccg

SEQ ID NO: 1134 - RNA, 19 nt, Artificial Sequence
  Description of Artificial Sequence: Synthetic oligonucleotide
caauggaguguacuaccgc

SEQ ID NO: 1135 - RNA, 19 nt, Artificial Sequence
  Description of Artificial Sequence: Synthetic oligonucleotide
aauggaguguacuaccgcc

SEQ ID NO: 1136 - RNA, 19 nt, Artificial Sequence
  Description of Artificial Sequence: Synthetic oligonucleotide
auggaguguacuaccgccu

SEQ ID NO: 1137 - RNA, 19 nt, Artificial Sequence
  Description of Artificial Sequence: Synthetic oligonucleotide
uggaguguacuaccgccug

SEQ ID NO: 1138 - RNA, 19 nt, Artificial Sequence
  Description of Artificial Sequence: Synthetic oligonucleotide
ggaguguacuaccgccugg

SEQ ID NO: 1139 - RNA, 19 nt, Artificial Sequence
  Description of Artificial Sequence: Synthetic oligonucleotide
gaguguacuaccgccuggg

SEQ ID NO: 1140 - RNA, 19 nt, Artificial Sequence
  Description of Artificial Sequence: Synthetic oligonucleotide
aguguacuaccgccugggu

SEQ ID NO: 1141 - RNA, 19 nt, Artificial Sequence
  Description of Artificial Sequence: Synthetic oligonucleotide
guguacuaccgccugggug

SEQ ID NO: 1142 - RNA, 19 nt, Artificial Sequence
  Description of Artificial Sequence: Synthetic oligonucleotide
uguacuaccgccuggguga

SEQ ID NO: 1143 - RNA, 19 nt, Artificial Sequence
  Description of Artificial Sequence: Synthetic oligonucleotide
guacuaccgccugggugag

SEQ ID NO: 1144 - RNA, 19 nt, Artificial Sequence
  Description of Artificial Sequence: Synthetic oligonucleotide
uacuaccgccugggugagc

SEQ ID NO: 1145 - RNA, 19 nt, Artificial Sequence
  Description of Artificial Sequence: Synthetic oligonucleotide
acuaccgccugggugagca

SEQ ID NO: 1146 - RNA, 19 nt, Artificial Sequence
  Description of Artificial Sequence: Synthetic oligonucleotide
cuaccgccugggugagcac

SEQ ID NO: 1147 - RNA, 19 nt, Artificial Sequence
  Description of Artificial Sequence: Synthetic oligonucleotide
uaccgccugggugagcaca

SEQ ID NO: 1148 - RNA, 19 nt, Artificial Sequence
  Description of Artificial Sequence: Synthetic oligonucleotide
accgccugggugagcacaa

SEQ ID NO: 1149 - RNA, 19 nt, Artificial Sequence
  Description of Artificial Sequence: Synthetic oligonucleotide
ccgccugggugagcacaau

SEQ ID NO: 1150 - RNA, 19 nt, Artificial Sequence
  Description of Artificial Sequence: Synthetic oligonucleotide
cgccugggugagcacaaua

SEQ ID NO: 1151 - RNA, 19 nt, Artificial Sequence
  Description of Artificial Sequence: Synthetic oligonucleotide
gccugggugagcacaauaa

SEQ ID NO: 1152 - RNA, 19 nt, Artificial Sequence
  Description of Artificial Sequence: Synthetic oligonucleotide
ccugggugagcacaauaag

SEQ ID NO: 1153 - RNA, 19 nt, Artificial Sequence
  Description of Artificial Sequence: Synthetic oligonucleotide
cugggugagcacaauaagc

SEQ ID NO: 1154 - RNA, 19 nt, Artificial Sequence
  Description of Artificial Sequence: Synthetic oligonucleotide
ugggugagcacaauaagca

SEQ ID NO: 1155 - RNA, 19 nt, Artificial Sequence
  Description of Artificial Sequence: Synthetic oligonucleotide
gggugagcacaauaagcac

SEQ ID NO: 1156 - RNA, 19 nt, Artificial Sequence
  Description of Artificial Sequence: Synthetic oligonucleotide
ggugagcacaauaagcacc

SEQ ID NO: 1157 - RNA, 19 nt, Artificial Sequence
  Description of Artificial Sequence: Synthetic oligonucleotide
gugagcacaauaagcaccu

SEQ ID NO: 1158 - RNA, 19 nt, Artificial Sequence
  Description of Artificial Sequence: Synthetic oligonucleotide
ugagcacaauaagcaccug

SEQ ID NO: 1159 - RNA, 19 nt, Artificial Sequence
  Description of Artificial Sequence: Synthetic oligonucleotide
gagcacaauaagcaccugg

SEQ ID NO: 1160 - RNA, 19 nt, Artificial Sequence
  Description of Artificial Sequence: Synthetic oligonucleotide
agcacaauaagcaccugga

SEQ ID NO: 1161 - RNA, 19 nt, Artificial Sequence
  Description of Artificial Sequence: Synthetic oligonucleotide
gcacaauaagcaccuggau

SEQ ID NO: 1162 - RNA, 19 nt, Artificial Sequence
  Description of Artificial Sequence: Synthetic oligonucleotide
cacaauaagcaccuggaug

SEQ ID NO: 1163 - RNA, 19 nt, Artificial Sequence
  Description of Artificial Sequence: Synthetic oligonucleotide
acaauaagcaccuggaugg

SEQ ID NO: 1164 - RNA, 19 nt, Artificial Sequence
  Description of Artificial Sequence: Synthetic oligonucleotide
caauaagcaccuggauggc

SEQ ID NO: 1165 - RNA, 19 nt, Artificial Sequence
  Description of Artificial Sequence: Synthetic oligonucleotide
aauaagcaccuggauggca

SEQ ID NO: 1166 - RNA, 19 nt, Artificial Sequence
  Description of Artificial Sequence: Synthetic oligonucleotide
auaagcaccuggauggcau

SEQ ID NO: 1167 - RNA, 19 nt, Artificial Sequence
  Description of Artificial Sequence: Synthetic oligonucleotide
uaagcaccuggauggcauc

SEQ ID NO: 1168 - RNA, 19 nt, Artificial Sequence
  Description of Artificial Sequence: Synthetic oligonucleotide
aagcaccuggauggcauca

SEQ ID NO: 1169 - RNA, 19 nt, Artificial Sequence
  Description of Artificial Sequence: Synthetic oligonucleotide
agcaccuggauggcaucac

SEQ ID NO: 1170 - RNA, 19 nt, Artificial Sequence
  Description of Artificial Sequence: Synthetic oligonucleotide
gcaccuggauggcaucacc

SEQ ID NO: 1171 - RNA, 19 nt, Artificial Sequence
  Description of Artificial Sequence: Synthetic oligonucleotide
caccuggauggcaucaccu

SEQ ID NO: 1172 - RNA, 19 nt, Artificial Sequence
  Description of Artificial Sequence: Synthetic oligonucleotide
accuggauggcaucaccug

SEQ ID NO: 1173 - RNA, 19 nt, Artificial Sequence
  Description of Artificial Sequence: Synthetic oligonucleotide
ccuggauggcaucaccugg

SEQ ID NO: 1174 - RNA, 19 nt, Artificial Sequence
  Description of Artificial Sequence: Synthetic oligonucleotide
cuggauggcaucaccuggu

SEQ ID NO: 1175 - RNA, 19 nt, Artificial Sequence
  Description of Artificial Sequence: Synthetic oligonucleotide
uggauggcaucaccuggua

SEQ ID NO: 1176 - RNA, 19 nt, Artificial Sequence
  Description of Artificial Sequence: Synthetic oligonucleotide
ggauggcaucaccugguau

SEQ ID NO: 1177 - RNA, 19 nt, Artificial Sequence
  Description of Artificial Sequence: Synthetic oligonucleotide
gauggcaucaccugguaug

SEQ ID NO: 1178 - RNA, 19 nt, Artificial Sequence
  Description of Artificial Sequence: Synthetic oligonucleotide
auggcaucaccugguaugg

SEQ ID NO: 1179 - RNA, 19 nt, Artificial Sequence
  Description of Artificial Sequence: Synthetic oligonucleotide
uggcaucaccugguauggc

SEQ ID NO: 1180 - RNA, 19 nt, Artificial Sequence
  Description of Artificial Sequence: Synthetic oligonucleotide
ggcaucaccugguauggcu

SEQ ID NO: 1181 - RNA, 19 nt, Artificial Sequence
  Description of Artificial Sequence: Synthetic oligonucleotide
gcaucaccugguauggcug

SEQ ID NO: 1182 - RNA, 19 nt, Artificial Sequence
  Description of Artificial Sequence: Synthetic oligonucleotide
caucaccugguauggcugg

SEQ ID NO: 1183 - RNA, 19 nt, Artificial Sequence
  Description of Artificial Sequence: Synthetic oligonucleotide
aucaccugguauggcuggc

SEQ ID NO: 1184 - RNA, 19 nt, Artificial Sequence
  Description of Artificial Sequence: Synthetic oligonucleotide
ucaccugguauggcuggca

SEQ ID NO: 1185 - RNA, 19 nt, Artificial Sequence
  Description of Artificial Sequence: Synthetic oligonucleotide
caccugguauggcuggcau

SEQ ID NO: 1186 - RNA, 19 nt, Artificial Sequence
  Description of Artificial Sequence: Synthetic oligonucleotide
accugguauggcuggcaug

SEQ ID NO: 1187 - RNA, 19 nt, Artificial Sequence
  Description of Artificial Sequence: Synthetic oligonucleotide
ccugguauggcuggcaugg

SEQ ID NO: 1188 - RNA, 19 nt, Artificial Sequence
  Description of Artificial Sequence: Synthetic oligonucleotide
cugguauggcuggcaugga

SEQ ID NO: 1189 - RNA, 19 nt, Artificial Sequence
  Description of Artificial Sequence: Synthetic oligonucleotide
ugguauggcuggcauggau

SEQ ID NO: 1190 - RNA, 19 nt, Artificial Sequence
  Description of Artificial Sequence: Synthetic oligonucleotide
gguauggcuggcauggauc

SEQ ID NO: 1191 - RNA, 19 nt, Artificial Sequence
  Description of Artificial Sequence: Synthetic oligonucleotide
guauggcuggcauggaucu

SEQ ID NO: 1192 - RNA, 19 nt, Artificial Sequence
  Description of Artificial Sequence: Synthetic oligonucleotide
uauggcuggcauggaucua

SEQ ID NO: 1193 - RNA, 19 nt, Artificial Sequence
  Description of Artificial Sequence: Synthetic oligonucleotide
auggcuggcauggaucuac

SEQ ID NO: 1194 - RNA, 19 nt, Artificial Sequence
  Description of Artificial Sequence: Synthetic oligonucleotide
uggcuggcauggaucuacc

SEQ ID NO: 1195 - RNA, 19 nt, Artificial Sequence
  Description of Artificial Sequence: Synthetic oligonucleotide
ggcuggcauggaucuaccu

SEQ ID NO: 1196 - RNA, 19 nt, Artificial Sequence
  Description of Artificial Sequence: Synthetic oligonucleotide
gcuggcauggaucuaccua

SEQ ID NO: 1197 - RNA, 19 nt, Artificial Sequence
  Description of Artificial Sequence: Synthetic oligonucleotide
cuggcauggaucuaccuac

SEQ ID NO: 1198 - RNA, 19 nt, Artificial Sequence
  Description of Artificial Sequence: Synthetic oligonucleotide
uggcauggaucuaccuacu

SEQ ID NO: 1199 - RNA, 19 nt, Artificial Sequence
  Description of Artificial Sequence: Synthetic oligonucleotide
ggcauggaucuaccuacuc

SEQ ID NO: 1200 - RNA, 19 nt, Artificial Sequence
  Description of Artificial Sequence: Synthetic oligonucleotide
gcauggaucuaccuacucc

SEQ ID NO: 1201 - RNA, 19 nt, Artificial Sequence
  Description of Artificial Sequence: Synthetic oligonucleotide
cauggaucuaccuacuccc

SEQ ID NO: 1202 - RNA, 19 nt, Artificial Sequence
  Description of Artificial Sequence: Synthetic oligonucleotide
auggaucuaccuacucccu

SEQ ID NO: 1203 - RNA, 19 nt, Artificial Sequence
  Description of Artificial Sequence: Synthetic oligonucleotide
uggaucuaccuacucccuc

SEQ ID NO: 1204 - RNA, 19 nt, Artificial Sequence
  Description of Artificial Sequence: Synthetic oligonucleotide
ggaucuaccuacucccuca

SEQ ID NO: 1205 - RNA, 19 nt, Artificial Sequence
  Description of Artificial Sequence: Synthetic oligonucleotide
gaucuaccuacucccucaa

SEQ ID NO: 1206 - RNA, 19 nt, Artificial Sequence
  Description of Artificial Sequence: Synthetic oligonucleotide
aucuaccuacucccucaaa

SEQ ID NO: 1207 - RNA, 19 nt, Artificial Sequence
  Description of Artificial Sequence: Synthetic oligonucleotide
ucuaccuacucccucaaac

SEQ ID NO: 1208 - RNA, 19 nt, Artificial Sequence
  Description of Artificial Sequence: Synthetic oligonucleotide
cuaccuacucccucaaacg

SEQ ID NO: 1209 - RNA, 19 nt, Artificial Sequence
  Description of Artificial Sequence: Synthetic oligonucleotide
uaccuacucccucaaacgg

SEQ ID NO: 1210 - RNA, 19 nt, Artificial Sequence
  Description of Artificial Sequence: Synthetic oligonucleotide
accuacucccucaaacggg

SEQ ID NO: 1211 - RNA, 19 nt, Artificial Sequence
  Description of Artificial Sequence: Synthetic oligonucleotide
ccuacucccucaaacgggu

SEQ ID NO: 1212 - RNA, 19 nt, Artificial Sequence
  Description of Artificial Sequence: Synthetic oligonucleotide
cuacucccucaaacgggug

SEQ ID NO: 1213 - RNA, 19 nt, Artificial Sequence
  Description of Artificial Sequence: Synthetic oligonucleotide
uacucccucaaacgggugg

SEQ ID NO: 1214 - RNA, 19 nt, Artificial Sequence
  Description of Artificial Sequence: Synthetic oligonucleotide
acucccucaaacgggugga

SEQ ID NO: 1215 - RNA, 19 nt, Artificial Sequence
  Description of Artificial Sequence: Synthetic oligonucleotide
cucccucaaacggguggag

SEQ ID NO: 1216 - RNA, 19 nt, Artificial Sequence
  Description of Artificial Sequence: Synthetic oligonucleotide
ucccucaaacggguggaga

SEQ ID NO: 1217 - RNA, 19 nt, Artificial Sequence
  Description of Artificial Sequence: Synthetic oligonucleotide
cccucaaacggguggagau

SEQ ID NO: 1218 - RNA, 19 nt, Artificial Sequence
  Description of Artificial Sequence: Synthetic oligonucleotide
ccucaaacggguggagaug

SEQ ID NO: 1219 - RNA, 19 nt, Artificial Sequence
  Description of Artificial Sequence: Synthetic oligonucleotide
cucaaacggguggagauga

SEQ ID NO: 1220 - RNA, 19 nt, Artificial Sequence
  Description of Artificial Sequence: Synthetic oligonucleotide
ucaaacggguggagaugaa

SEQ ID NO: 1221 - RNA, 19 nt, Artificial Sequence
  Description of Artificial Sequence: Synthetic oligonucleotide
caaacggguggagaugaaa

SEQ ID NO: 1222 - RNA, 19 nt, Artificial Sequence
  Description of Artificial Sequence: Synthetic oligonucleotide
aaacggguggagaugaaaa

SEQ ID NO: 1223 - RNA, 19 nt, Artificial Sequence
  Description of Artificial Sequence: Synthetic oligonucleotide
aacggguggagaugaaaau

SEQ ID NO: 1224 - RNA, 19 nt, Artificial Sequence
  Description of Artificial Sequence: Synthetic oligonucleotide
acggguggagaugaaaauc

SEQ ID NO: 1225 - RNA, 19 nt, Artificial Sequence
  Description of Artificial Sequence: Synthetic oligonucleotide
cggguggagaugaaaaucc

SEQ ID NO: 1226 - RNA, 19 nt, Artificial Sequence
  Description of Artificial Sequence: Synthetic oligonucleotide
ggguggagaugaaaauccg

SEQ ID NO: 1227 - RNA, 19 nt, Artificial Sequence
  Description of Artificial Sequence: Synthetic oligonucleotide
gguggagaugaaaauccgc

SEQ ID NO: 1228 - RNA, 19 nt, Artificial Sequence
  Description of Artificial Sequence: Synthetic oligonucleotide
guggagaugaaaauccgcc

SEQ ID NO: 1229 - RNA, 19 nt, Artificial Sequence
  Description of Artificial Sequence: Synthetic oligonucleotide
uggagaugaaaauccgccc

SEQ ID NO: 1230 - RNA, 19 nt, Artificial Sequence
  Description of Artificial Sequence: Synthetic oligonucleotide
ggagaugaaaauccgccca

SEQ ID NO: 1231 - RNA, 19 nt, Artificial Sequence
  Description of Artificial Sequence: Synthetic oligonucleotide
gagaugaaaauccgcccag

SEQ ID NO: 1232 - RNA, 19 nt, Artificial Sequence
  Description of Artificial Sequence: Synthetic oligonucleotide
agaugaaaauccgcccaga

SEQ ID NO: 1233 - RNA, 19 nt, Artificial Sequence
  Description of Artificial Sequence: Synthetic oligonucleotide
gaugaaaauccgcccagaa

SEQ ID NO: 1234 - RNA, 19 nt, Artificial Sequence
  Description of Artificial Sequence: Synthetic oligonucleotide
augaaaauccgcccagaag

SEQ ID NO: 1235 - RNA, 19 nt, Artificial Sequence
  Description of Artificial Sequence: Synthetic oligonucleotide
ugaaaauccgcccagaaga

SEQ ID NO: 1236 - RNA, 19 nt, Artificial Sequence
  Description of Artificial Sequence: Synthetic oligonucleotide
gaaaauccgcccagaagac

SEQ ID NO: 1237 - RNA, 19 nt, Artificial Sequence
  Description of Artificial Sequence: Synthetic oligonucleotide
aaaauccgcccagaagacu

SEQ ID NO: 1238 - RNA, 19 nt, Artificial Sequence
  Description of Artificial Sequence: Synthetic oligonucleotide
aaauccgcccagaagacuu

SEQ ID NO: 1239 - RNA, 19 nt, Artificial Sequence
  Description of Artificial Sequence: Synthetic oligonucleotide
aauccgcccagaagacuuc

SEQ ID NO: 1240 - RNA, 19 nt, Artificial Sequence
  Description of Artificial Sequence: Synthetic oligonucleotide
auccgcccagaagacuuca

SEQ ID NO: 1241 - RNA, 19 nt, Artificial Sequence
  Description of Artificial Sequence: Synthetic oligonucleotide
uccgcccagaagacuucaa

SEQ ID NO: 1242 - RNA, 19 nt, Artificial Sequence
  Description of Artificial Sequence: Synthetic oligonucleotide
ccgcccagaagacuucaag

SEQ ID NO: 1243 - RNA, 19 nt, Artificial Sequence
  Description of Artificial Sequence: Synthetic oligonucleotide
cgcccagaagacuucaagc

SEQ ID NO: 1244 - RNA, 19 nt, Artificial Sequence
  Description of Artificial Sequence: Synthetic oligonucleotide
gcccagaagacuucaagcc

SEQ ID NO: 1245 - RNA, 19 nt, Artificial Sequence
  Description of Artificial Sequence: Synthetic oligonucleotide
cccagaagacuucaagccu

SEQ ID NO: 1246 - RNA, 19 nt, Artificial Sequence
  Description of Artificial Sequence: Synthetic oligonucleotide
ccagaagacuucaagccuu

SEQ ID NO: 1247 - RNA, 19 nt, Artificial Sequence
  Description of Artificial Sequence: Synthetic oligonucleotide
cagaagacuucaagccuua

SEQ ID NO: 1248 - RNA, 19 nt, Artificial Sequence
  Description of Artificial Sequence: Synthetic oligonucleotide
agaagacuucaagccuuaa

SEQ ID NO: 1249 - RNA, 19 nt, Artificial Sequence
  Description of Artificial Sequence: Synthetic oligonucleotide
gaagacuucaagccuuaaa

SEQ ID NO: 1250 - RNA, 19 nt, Artificial Sequence
  Description of Artificial Sequence: Synthetic oligonucleotide
aagacuucaagccuuaaaa

SEQ ID NO: 1251 - RNA, 19 nt, Artificial Sequence
  Description of Artificial Sequence: Synthetic oligonucleotide
agacuucaagccuuaaaag

SEQ ID NO: 1252 - RNA, 19 nt, Artificial Sequence
  Description of Artificial Sequence: Synthetic oligonucleotide
gacuucaagccuuaaaagg

SEQ ID NO: 1253 - RNA, 19 nt, Artificial Sequence
  Description of Artificial Sequence: Synthetic oligonucleotide
acuucaagccuuaaaagga

SEQ ID NO: 1254 - RNA, 19 nt, Artificial Sequence
  Description of Artificial Sequence: Synthetic oligonucleotide
cuucaagccuuaaaaggag

SEQ ID NO: 1255 - RNA, 19 nt, Artificial Sequence
  Description of Artificial Sequence: Synthetic oligonucleotide
uucaagccuuaaaaggagg

SEQ ID NO: 1256 - RNA, 19 nt, Artificial Sequence
  Description of Artificial Sequence: Synthetic oligonucleotide
ucaagccuuaaaaggaggc

SEQ ID NO: 1257 - RNA, 19 nt, Artificial Sequence
  Description of Artificial Sequence: Synthetic oligonucleotide
caagccuuaaaaggaggcu

SEQ ID NO: 1258 - RNA, 19 nt, Artificial Sequence
  Description of Artificial Sequence: Synthetic oligonucleotide
aagccuuaaaaggaggcug

SEQ ID NO: 1259 - RNA, 19 nt, Artificial Sequence
  Description of Artificial Sequence: Synthetic oligonucleotide
agccuuaaaaggaggcugc

SEQ ID NO: 1260 - RNA, 19 nt, Artificial Sequence
  Description of Artificial Sequence: Synthetic oligonucleotide
gccuuaaaaggaggcugcc

SEQ ID NO: 1261 - RNA, 19 nt, Artificial Sequence
  Description of Artificial Sequence: Synthetic oligonucleotide
ccuuaaaaggaggcugccg

SEQ ID NO: 1262 - RNA, 19 nt, Artificial Sequence
  Description of Artificial Sequence: Synthetic oligonucleotide
cuuaaaaggaggcugccgu

SEQ ID NO: 1263 - RNA, 19 nt, Artificial Sequence
  Description of Artificial Sequence: Synthetic oligonucleotide
uuaaaaggaggcugccgug

SEQ ID NO: 1264 - RNA, 19 nt, Artificial Sequence
  Description of Artificial Sequence: Synthetic oligonucleotide
uaaaaggaggcugccgugg

SEQ ID NO: 1265 - RNA, 19 nt, Artificial Sequence
  Description of Artificial Sequence: Synthetic oligonucleotide
aaaaggaggcugccgugga

SEQ ID NO: 1266 - RNA, 19 nt, Artificial Sequence
  Description of Artificial Sequence: Synthetic oligonucleotide
aaaggaggcugccguggag

SEQ ID NO: 1267 - RNA, 19 nt, Artificial Sequence
  Description of Artificial Sequence: Synthetic oligonucleotide
aaggaggcugccguggagc

SEQ ID NO: 1268 - RNA, 19 nt, Artificial Sequence
  Description of Artificial Sequence: Synthetic oligonucleotide
aggaggcugccguggagca

SEQ ID NO: 1269 - RNA, 19 nt, Artificial Sequence
  Description of Artificial Sequence: Synthetic oligonucleotide
ggaggcugccguggagcac

SEQ ID NO: 1270 - RNA, 19 nt, Artificial Sequence
  Description of Artificial Sequence: Synthetic oligonucleotide
gaggcugccguggagcacg

SEQ ID NO: 1271 - RNA, 19 nt, Artificial Sequence
  Description of Artificial Sequence: Synthetic oligonucleotide
aggcugccguggagcacgg

SEQ ID NO: 1272 - RNA, 19 nt, Artificial Sequence
  Description of Artificial Sequence: Synthetic oligonucleotide
ggcugccguggagcacgga

SEQ ID NO: 1273 - RNA, 19 nt, Artificial Sequence
  Description of Artificial Sequence: Synthetic oligonucleotide
gcugccguggagcacggau

SEQ ID NO: 1274 - RNA, 19 nt, Artificial Sequence
  Description of Artificial Sequence: Synthetic oligonucleotide
cugccguggagcacggaua

SEQ ID NO: 1275 - RNA, 19 nt, Artificial Sequence
  Description of Artificial Sequence: Synthetic oligonucleotide
ugccguggagcacggauac

SEQ ID NO: 1276 - RNA, 19 nt, Artificial Sequence
  Description of Artificial Sequence: Synthetic oligonucleotide
gccguggagcacggauaca

SEQ ID NO: 1277 - RNA, 19 nt, Artificial Sequence
  Description of Artificial Sequence: Synthetic oligonucleotide
ccguggagcacggauacag

SEQ ID NO: 1278 - RNA, 19 nt, Artificial Sequence
  Description of Artificial Sequence: Synthetic oligonucleotide
cguggagcacggauacaga

SEQ ID NO: 1279 - RNA, 19 nt, Artificial Sequence
  Description of Artificial Sequence: Synthetic oligonucleotide
guggagcacggauacagaa

SEQ ID NO: 1280 - RNA, 19 nt, Artificial Sequence
  Description of Artificial Sequence: Synthetic oligonucleotide
uggagcacggauacagaaa

SEQ ID NO: 1281 - RNA, 19 nt, Artificial Sequence
  Description of Artificial Sequence: Synthetic oligonucleotide
ggagcacggauacagaaac

SEQ ID NO: 1282 - RNA, 19 nt, Artificial Sequence
  Description of Artificial Sequence: Synthetic oligonucleotide
gagcacggauacagaaacu

SEQ ID NO: 1283 - RNA, 19 nt, Artificial Sequence
  Description of Artificial Sequence: Synthetic oligonucleotide
agcacggauacagaaacug

SEQ ID NO: 1284 - RNA, 19 nt, Artificial Sequence
  Description of Artificial Sequence: Synthetic oligonucleotide
gcacggauacagaaacuga

SEQ ID NO: 1285 - RNA, 19 nt, Artificial Sequence
  Description of Artificial Sequence: Synthetic oligonucleotide
cacggauacagaaacugag

SEQ ID NO: 1286 - RNA, 19 nt, Artificial Sequence
  Description of Artificial Sequence: Synthetic oligonucleotide
acggauacagaaacugaga

SEQ ID NO: 1287 - RNA, 19 nt, Artificial Sequence
  Description of Artificial Sequence: Synthetic oligonucleotide
cggauacagaaacugagac

SEQ ID NO: 1288 - RNA, 19 nt, Artificial Sequence
  Description of Artificial Sequence: Synthetic oligonucleotide
ggauacagaaacugagaca

SEQ ID NO: 1289 - RNA, 19 nt, Artificial Sequence
  Description of Artificial Sequence: Synthetic oligonucleotide
gauacagaaacugagacac

SEQ ID NO: 1290 - RNA, 19 nt, Artificial Sequence
  Description of Artificial Sequence: Synthetic oligonucleotide
auacagaaacugagacacg

SEQ ID NO: 1291 - RNA, 19 nt, Artificial Sequence
  Description of Artificial Sequence: Synthetic oligonucleotide
uacagaaacugagacacgu

SEQ ID NO: 1292 - RNA, 19 nt, Artificial Sequence
  Description of Artificial Sequence: Synthetic oligonucleotide
acagaaacugagacacgug

SEQ ID NO: 1293 - RNA, 19 nt, Artificial Sequence
  Description of Artificial Sequence: Synthetic oligonucleotide
cagaaacugagacacgugg

SEQ ID NO: 1294 - RNA, 19 nt, Artificial Sequence
  Description of Artificial Sequence: Synthetic oligonucleotide
agaaacugagacacgugga

SEQ ID NO: 1295 - RNA, 19 nt, Artificial Sequence
  Description of Artificial Sequence: Synthetic oligonucleotide
gaaacugagacacguggag

SEQ ID NO: 1296 - RNA, 19 nt, Artificial Sequence
  Description of Artificial Sequence: Synthetic oligonucleotide
aaacugagacacguggaga

SEQ ID NO: 1297 - RNA, 19 nt, Artificial Sequence
  Description of Artificial Sequence: Synthetic oligonucleotide
aacugagacacguggagac

SEQ ID NO: 1298 - RNA, 19 nt, Artificial Sequence
  Description of Artificial Sequence: Synthetic oligonucleotide
acugagacacguggagacu

SEQ ID NO: 1299 - RNA, 19 nt, Artificial Sequence
  Description of Artificial Sequence: Synthetic oligonucleotide
cugagacacguggagacug

SEQ ID NO: 1300 - RNA, 19 nt, Artificial Sequence
  Description of Artificial Sequence: Synthetic oligonucleotide
ugagacacguggagacugg

SEQ ID NO: 1301 - RNA, 19 nt, Artificial Sequence
  Description of Artificial Sequence: Synthetic oligonucleotide
gagacacguggagacugga

SEQ ID NO: 1302 - RNA, 19 nt, Artificial Sequence
  Description of Artificial Sequence: Synthetic oligonucleotide
agacacguggagacuggau

SEQ ID NO: 1303 - RNA, 19 nt, Artificial Sequence
  Description of Artificial Sequence: Synthetic oligonucleotide
gacacguggagacuggaug

SEQ ID NO: 1304 - RNA, 19 nt, Artificial Sequence
  Description of Artificial Sequence: Synthetic oligonucleotide
acacguggagacuggauga

SEQ ID NO: 1305 - RNA, 19 nt, Artificial Sequence
  Description of Artificial Sequence: Synthetic oligonucleotide
cacguggagacuggaugag

SEQ ID NO: 1306 - RNA, 19 nt, Artificial Sequence
  Description of Artificial Sequence: Synthetic oligonucleotide
acguggagacuggaugagg

SEQ ID NO: 1307 - RNA, 19 nt, Artificial Sequence
  Description of Artificial Sequence: Synthetic oligonucleotide
cguggagacuggaugaggg

SEQ ID NO: 1308 - RNA, 19 nt, Artificial Sequence
  Description of Artificial Sequence: Synthetic oligonucleotide
guggagacuggaugagggc

SEQ ID NO: 1309 - RNA, 19 nt, Artificial Sequence
  Description of Artificial Sequence: Synthetic oligonucleotide
uggagacuggaugagggca

SEQ ID NO: 1310 - RNA, 19 nt, Artificial Sequence
  Description of Artificial Sequence: Synthetic oligonucleotide
ggagacuggaugagggcag

SEQ ID NO: 1311 - RNA, 19 nt, Artificial Sequence
  Description of Artificial Sequence: Synthetic oligonucleotide
gagacuggaugagggcaga

SEQ ID NO: 1312 - RNA, 19 nt, Artificial Sequence
  Description of Artificial Sequence: Synthetic oligonucleotide
agacuggaugagggcagau

SEQ ID NO: 1313 - RNA, 19 nt, Artificial Sequence
  Description of Artificial Sequence: Synthetic oligonucleotide
gacuggaugagggcagaug

SEQ ID NO: 1314 - RNA, 19 nt, Artificial Sequence
  Description of Artificial Sequence: Synthetic oligonucleotide
acuggaugagggcagauga

SEQ ID NO: 1315 - RNA, 19 nt, Artificial Sequence
  Description of Artificial Sequence: Synthetic oligonucleotide
cuggaugagggcagaugag

SEQ ID NO: 1316 - RNA, 19 nt, Artificial Sequence
  Description of Artificial Sequence: Synthetic oligonucleotide
uggaugagggcagaugagg

SEQ ID NO: 1317 - RNA, 19 nt, Artificial Sequence
  Description of Artificial Sequence: Synthetic oligonucleotide
ggaugagggcagaugagga

SEQ ID NO: 1318 - RNA, 19 nt, Artificial Sequence
  Description of Artificial Sequence: Synthetic oligonucleotide
gaugagggcagaugaggac

SEQ ID NO: 1319 - RNA, 19 nt, Artificial Sequence
  Description of Artificial Sequence: Synthetic oligonucleotide
augagggcagaugaggaca

SEQ ID NO: 1320 - RNA, 19 nt, Artificial Sequence
  Description of Artificial Sequence: Synthetic oligonucleotide
ugagggcagaugaggacag

SEQ ID NO: 1321 - RNA, 19 nt, Artificial Sequence
  Description of Artificial Sequence: Synthetic oligonucleotide
gagggcagaugaggacagg

SEQ ID NO: 1322 - RNA, 19 nt, Artificial Sequence
  Description of Artificial Sequence: Synthetic oligonucleotide
agggcagaugaggacagga

SEQ ID NO: 1323 - RNA, 19 nt, Artificial Sequence
  Description of Artificial Sequence: Synthetic oligonucleotide
gggcagaugaggacaggaa

SEQ ID NO: 1324 - RNA, 19 nt, Artificial Sequence
  Description of Artificial Sequence: Synthetic oligonucleotide
ggcagaugaggacaggaag

SEQ ID NO: 1325 - RNA, 19 nt, Artificial Sequence
  Description of Artificial Sequence: Synthetic oligonucleotide
gcagaugaggacaggaaga

SEQ ID NO: 1326 - RNA, 19 nt, Artificial Sequence
  Description of Artificial Sequence: Synthetic oligonucleotide
cagaugaggacaggaagag

SEQ ID NO: 1327 - RNA, 19 nt, Artificial Sequence
  Description of Artificial Sequence: Synthetic oligonucleotide
agaugaggacaggaagaga

SEQ ID NO: 1328 - RNA, 19 nt, Artificial Sequence
  Description of Artificial Sequence: Synthetic oligonucleotide
gaugaggacaggaagagag

SEQ ID NO: 1329 - RNA, 19 nt, Artificial Sequence
  Description of Artificial Sequence: Synthetic oligonucleotide
augaggacaggaagagagu

SEQ ID NO: 1330 - RNA, 19 nt, Artificial Sequence
  Description of Artificial Sequence: Synthetic oligonucleotide
ugaggacaggaagagagug

SEQ ID NO: 1331 - RNA, 19 nt, Artificial Sequence
  Description of Artificial Sequence: Synthetic oligonucleotide
gaggacaggaagagagugu

SEQ ID NO: 1332 - RNA, 19 nt, Artificial Sequence
  Description of Artificial Sequence: Synthetic oligonucleotide
aggacaggaagagaguguu

SEQ ID NO: 1333 - RNA, 19 nt, Artificial Sequence
  Description of Artificial Sequence: Synthetic oligonucleotide
ggacaggaagagaguguua

SEQ ID NO: 1334 - RNA, 19 nt, Artificial Sequence
  Description of Artificial Sequence: Synthetic oligonucleotide
gacaggaagagaguguuag

SEQ ID NO: 1335 - RNA, 19 nt, Artificial Sequence
  Description of Artificial Sequence: Synthetic oligonucleotide
acaggaagagaguguuaga

SEQ ID NO: 1336 - RNA, 19 nt, Artificial Sequence
  Description of Artificial Sequence: Synthetic oligonucleotide
caggaagagaguguuagaa

SEQ ID NO: 1337 - RNA, 19 nt, Artificial Sequence
  Description of Artificial Sequence: Synthetic oligonucleotide
aggaagagaguguuagaaa

SEQ ID NO: 1338 - RNA, 19 nt, Artificial Sequence
  Description of Artificial Sequence: Synthetic oligonucleotide
ggaagagaguguuagaaag

SEQ ID NO: 1339 - RNA, 19 nt, Artificial Sequence
  Description of Artificial Sequence: Synthetic oligonucleotide
gaagagaguguuagaaagg

SEQ ID NO: 1340 - RNA, 19 nt, Artificial Sequence
  Description of Artificial Sequence: Synthetic oligonucleotide
aagagaguguuagaaaggg

SEQ ID NO: 1341 - RNA, 19 nt, Artificial Sequence
  Description of Artificial Sequence: Synthetic oligonucleotide
agagaguguuagaaagggu

SEQ ID NO: 1342 - RNA, 19 nt, Artificial Sequence
  Description of Artificial Sequence: Synthetic oligonucleotide
gagaguguuagaaagggua

SEQ ID NO: 1343 - RNA, 19 nt, Artificial Sequence
  Description of Artificial Sequence: Synthetic oligonucleotide
agaguguuagaaaggguag

SEQ ID NO: 1344 - RNA, 19 nt, Artificial Sequence
  Description of Artificial Sequence: Synthetic oligonucleotide
gaguguuagaaaggguagg

SEQ ID NO: 1345 - RNA, 19 nt, Artificial Sequence
  Description of Artificial Sequence: Synthetic oligonucleotide
aguguuagaaaggguagga

SEQ ID NO: 1346 - RNA, 19 nt, Artificial Sequence
  Description of Artificial Sequence: Synthetic oligonucleotide
guguuagaaaggguaggac

SEQ ID NO: 1347 - RNA, 19 nt, Artificial Sequence
  Description of Artificial Sequence: Synthetic oligonucleotide
uguuagaaaggguaggacu

SEQ ID NO: 1348 - RNA, 19 nt, Artificial Sequence
  Description of Artificial Sequence: Synthetic oligonucleotide
guuagaaaggguaggacug

SEQ ID NO: 1349 - RNA, 19 nt, Artificial Sequence
  Description of Artificial Sequence: Synthetic oligonucleotide
uuagaaaggguaggacuga

SEQ ID NO: 1350 - RNA, 19 nt, Artificial Sequence
  Description of Artificial Sequence: Synthetic oligonucleotide
uagaaaggguaggacugag

SEQ ID NO: 1351 - RNA, 19 nt, Artificial Sequence
  Description of Artificial Sequence: Synthetic oligonucleotide
agaaaggguaggacugaga

SEQ ID NO: 1352 - RNA, 19 nt, Artificial Sequence
  Description of Artificial Sequence: Synthetic oligonucleotide
gaaaggguaggacugagaa

SEQ ID NO: 1353 - RNA, 19 nt, Artificial Sequence
  Description of Artificial Sequence: Synthetic oligonucleotide
aaaggguaggacugagaaa

SEQ ID NO: 1354 - RNA, 19 nt, Artificial Sequence
  Description of Artificial Sequence: Synthetic oligonucleotide
aaggguaggacugagaaac

SEQ ID NO: 1355 - RNA, 19 nt, Artificial Sequence
  Description of Artificial Sequence: Synthetic oligonucleotide
aggguaggacugagaaaca

SEQ ID NO: 1356 - RNA, 19 nt, Artificial Sequence
  Description of Artificial Sequence: Synthetic oligonucleotide
ggguaggacugagaaacag

SEQ ID NO: 1357 - RNA, 19 nt, Artificial Sequence
  Description of Artificial Sequence: Synthetic oligonucleotide
gguaggacugagaaacagc

SEQ ID NO: 1358 - RNA, 19 nt, Artificial Sequence
  Description of Artificial Sequence: Synthetic oligonucleotide
guaggacugagaaacagcc

SEQ ID NO: 1359 - RNA, 19 nt, Artificial Sequence
  Description of Artificial Sequence: Synthetic oligonucleotide
uaggacugagaaacagccu

SEQ ID NO: 1360 - RNA, 19 nt, Artificial Sequence
  Description of Artificial Sequence: Synthetic oligonucleotide
aggacugagaaacagccua

SEQ ID NO: 1361 - RNA, 19 nt, Artificial Sequence
  Description of Artificial Sequence: Synthetic oligonucleotide
ggacugagaaacagccuau

SEQ ID NO: 1362 - RNA, 19 nt, Artificial Sequence
  Description of Artificial Sequence: Synthetic oligonucleotide
gacugagaaacagccuaua

SEQ ID NO: 1363 - RNA, 19 nt, Artificial Sequence
  Description of Artificial Sequence: Synthetic oligonucleotide
acugagaaacagccuauaa

SEQ ID NO: 1364 - RNA, 19 nt, Artificial Sequence
  Description of Artificial Sequence: Synthetic oligonucleotide
cugagaaacagccuauaau

SEQ ID NO: 1365 - RNA, 19 nt, Artificial Sequence
  Description of Artificial Sequence: Synthetic oligonucleotide
ugagaaacagccuauaauc

SEQ ID NO: 1366 - RNA, 19 nt, Artificial Sequence
  Description of Artificial Sequence: Synthetic oligonucleotide
gagaaacagccuauaaucu

SEQ ID NO: 1367 - RNA, 19 nt, Artificial Sequence
  Description of Artificial Sequence: Synthetic oligonucleotide
agaaacagccuauaaucuc

SEQ ID NO: 1368 - RNA, 19 nt, Artificial Sequence
  Description of Artificial Sequence: Synthetic oligonucleotide
gaaacagccuauaaucucc

SEQ ID NO: 1369 - RNA, 19 nt, Artificial Sequence
  Description of Artificial Sequence: Synthetic oligonucleotide
aaacagccuauaaucucca

SEQ ID NO: 1370 - RNA, 19 nt, Artificial Sequence
  Description of Artificial Sequence: Synthetic oligonucleotide
aacagccuauaaucuccaa

SEQ ID NO: 1371 - RNA, 19 nt, Artificial Sequence
  Description of Artificial Sequence: Synthetic oligonucleotide
acagccuauaaucuccaaa

SEQ ID NO: 1372 - RNA, 19 nt, Artificial Sequence
  Description of Artificial Sequence: Synthetic oligonucleotide
cagccuauaaucuccaaag

SEQ ID NO: 1373 - RNA, 19 nt, Artificial Sequence
  Description of Artificial Sequence: Synthetic oligonucleotide
agccuauaaucuccaaaga

SEQ ID NO: 1374 - RNA, 19 nt, Artificial Sequence
  Description of Artificial Sequence: Synthetic oligonucleotide
gccuauaaucuccaaagaa

SEQ ID NO: 1375 - RNA, 19 nt, Artificial Sequence
  Description of Artificial Sequence: Synthetic oligonucleotide
ccuauaaucuccaaagaaa

SEQ ID NO: 1376 - RNA, 19 nt, Artificial Sequence
  Description of Artificial Sequence: Synthetic oligonucleotide
cuauaaucuccaaagaaag

SEQ ID NO: 1377 - RNA, 19 nt, Artificial Sequence
  Description of Artificial Sequence: Synthetic oligonucleotide
uauaaucuccaaagaaaga

SEQ ID NO: 1378 - RNA, 19 nt, Artificial Sequence
  Description of Artificial Sequence: Synthetic oligonucleotide
auaaucuccaaagaaagaa

SEQ ID NO: 1379 - RNA, 19 nt, Artificial Sequence
  Description of Artificial Sequence: Synthetic oligonucleotide
uaaucuccaaagaaagaau

SEQ ID NO: 1380 - RNA, 19 nt, Artificial Sequence
  Description of Artificial Sequence: Synthetic oligonucleotide
aaucuccaaagaaagaaua

SEQ ID NO: 1381 - RNA, 19 nt, Artificial Sequence
  Description of Artificial Sequence: Synthetic oligonucleotide
aucuccaaagaaagaauaa

SEQ ID NO: 1382 - RNA, 19 nt, Artificial Sequence
  Description of Artificial Sequence: Synthetic oligonucleotide
ucuccaaagaaagaauaag

SEQ ID NO: 1383 - RNA, 19 nt, Artificial Sequence
  Description of Artificial Sequence: Synthetic oligonucleotide
cuccaaagaaagaauaagu

SEQ ID NO: 1384 - RNA, 19 nt, Artificial Sequence
  Description of Artificial Sequence: Synthetic oligonucleotide
uccaaagaaagaauaaguc

SEQ ID NO: 1385 - RNA, 19 nt, Artificial Sequence
  Description of Artificial Sequence: Synthetic oligonucleotide
ccaaagaaagaauaagucu

SEQ ID NO: 1386 - RNA, 19 nt, Artificial Sequence
  Description of Artificial Sequence: Synthetic oligonucleotide
caaagaaagaauaagucuc

SEQ ID NO: 1387 - RNA, 19 nt, Artificial Sequence
  Description of Artificial Sequence: Synthetic oligonucleotide
aaagaaagaauaagucucc

SEQ ID NO: 1388 - RNA, 19 nt, Artificial Sequence
  Description of Artificial Sequence: Synthetic oligonucleotide
aagaaagaauaagucucca

SEQ ID NO: 1389 - RNA, 19 nt, Artificial Sequence
  Description of Artificial Sequence: Synthetic oligonucleotide
agaaagaauaagucuccaa

SEQ ID NO: 1390 - RNA, 19 nt, Artificial Sequence
  Description of Artificial Sequence: Synthetic oligonucleotide
gaaagaauaagucuccaag

SEQ ID NO: 1391 - RNA, 19 nt, Artificial Sequence
  Description of Artificial Sequence: Synthetic oligonucleotide
aaagaauaagucuccaagg

SEQ ID NO: 1392 - RNA, 19 nt, Artificial Sequence
  Description of Artificial Sequence: Synthetic oligonucleotide
aagaauaagucuccaagga

SEQ ID NO: 1393 - RNA, 19 nt, Artificial Sequence
  Description of Artificial Sequence: Synthetic oligonucleotide
agaauaagucuccaaggag

SEQ ID NO: 1394 - RNA, 19 nt, Artificial Sequence
  Description of Artificial Sequence: Synthetic oligonucleotide
gaauaagucuccaaggagc

SEQ ID NO: 1395 - RNA, 19 nt, Artificial Sequence
  Description of Artificial Sequence: Synthetic oligonucleotide
aauaagucuccaaggagca

SEQ ID NO: 1396 - RNA, 19 nt, Artificial Sequence
  Description of Artificial Sequence: Synthetic oligonucleotide
auaagucuccaaggagcac

SEQ ID NO: 1397 - RNA, 19 nt, Artificial Sequence
  Description of Artificial Sequence: Synthetic oligonucleotide
uaagucuccaaggagcaca

SEQ ID NO: 1398 - RNA, 19 nt, Artificial Sequence
  Description of Artificial Sequence: Synthetic oligonucleotide
aagucuccaaggagcacaa

SEQ ID NO: 1399 - RNA, 19 nt, Artificial Sequence
  Description of Artificial Sequence: Synthetic oligonucleotide
agucuccaaggagcacaaa

SEQ ID NO: 1400 - RNA, 19 nt, Artificial Sequence
  Description of Artificial Sequence: Synthetic oligonucleotide
gucuccaaggagcacaaaa

SEQ ID NO: 1401 - RNA, 19 nt, Artificial Sequence
  Description of Artificial Sequence: Synthetic oligonucleotide
ucuccaaggagcacaaaaa

SEQ ID NO: 1402 - RNA, 19 nt, Artificial Sequence
  Description of Artificial Sequence: Synthetic oligonucleotide
cuccaaggagcacaaaaaa

SEQ ID NO: 1403 - RNA, 19 nt, Artificial Sequence
  Description of Artificial Sequence: Synthetic oligonucleotide
uccaaggagcacaaaaaaa

SEQ ID NO: 1404 - RNA, 19 nt, Artificial Sequence
  Description of Artificial Sequence: Synthetic oligonucleotide
ccaaggagcacaaaaaaau

SEQ ID NO: 1405 - RNA, 19 nt, Artificial Sequence
  Description of Artificial Sequence: Synthetic oligonucleotide
caaggagcacaaaaaaauc

SEQ ID NO: 1406 - RNA, 19 nt, Artificial Sequence
  Description of Artificial Sequence: Synthetic oligonucleotide
aaggagcacaaaaaaauca

SEQ ID NO: 1407 - RNA, 19 nt, Artificial Sequence
  Description of Artificial Sequence: Synthetic oligonucleotide
aggagcacaaaaaaaucau

SEQ ID NO: 1408 - RNA, 19 nt, Artificial Sequence
  Description of Artificial Sequence: Synthetic oligonucleotide
ggagcacaaaaaaaucaua

SEQ ID NO: 1409 - RNA, 19 nt, Artificial Sequence
  Description of Artificial Sequence: Synthetic oligonucleotide
gagcacaaaaaaaucauau

SEQ ID NO: 1410 - RNA, 19 nt, Artificial Sequence
  Description of Artificial Sequence: Synthetic oligonucleotide
agcacaaaaaaaucauaug

SEQ ID NO: 1411 - RNA, 19 nt, Artificial Sequence
  Description of Artificial Sequence: Synthetic oligonucleotide
gcacaaaaaaaucauaugu

SEQ ID NO: 1412 - RNA, 19 nt, Artificial Sequence
  Description of Artificial Sequence: Synthetic oligonucleotide
cacaaaaaaaucauaugua

SEQ ID NO: 1413 - RNA, 19 nt, Artificial Sequence
  Description of Artificial Sequence: Synthetic oligonucleotide
acaaaaaaaucauauguac

SEQ ID NO: 1414 - RNA, 19 nt, Artificial Sequence
  Description of Artificial Sequence: Synthetic oligonucleotide
caaaaaaaucauauguacc

SEQ ID NO: 1415 - RNA, 19 nt, Artificial Sequence
  Description of Artificial Sequence: Synthetic oligonucleotide
aaaaaaaucauauguacca

SEQ ID NO: 1416 - RNA, 19 nt, Artificial Sequence
  Description of Artificial Sequence: Synthetic oligonucleotide
aaaaaaucauauguaccaa

SEQ ID NO: 1417 - RNA, 19 nt, Artificial Sequence
  Description of Artificial Sequence: Synthetic oligonucleotide
aaaaaucauauguaccaag

SEQ ID NO: 1418 - RNA, 19 nt, Artificial Sequence
  Description of Artificial Sequence: Synthetic oligonucleotide
aaaaucauauguaccaagg

SEQ ID NO: 1419 - RNA, 19 nt, Artificial Sequence
  Description of Artificial Sequence: Synthetic oligonucleotide
aaaucauauguaccaagga

SEQ ID NO: 1420 - RNA, 19 nt, Artificial Sequence
  Description of Artificial Sequence: Synthetic oligonucleotide
aaucauauguaccaaggau

SEQ ID NO: 1421 - RNA, 19 nt, Artificial Sequence
  Description of Artificial Sequence: Synthetic oligonucleotide
aucauauguaccaaggaug

SEQ ID NO: 1422 - RNA, 19 nt, Artificial Sequence
  Description of Artificial Sequence: Synthetic oligonucleotide
ucauauguaccaaggaugu

SEQ ID NO: 1423 - RNA, 19 nt, Artificial Sequence
  Description of Artificial Sequence: Synthetic oligonucleotide
cauauguaccaaggauguu

SEQ ID NO: 1424 - RNA, 19 nt, Artificial Sequence
  Description of Artificial Sequence: Synthetic oligonucleotide
auauguaccaaggauguua

SEQ ID NO: 1425 - RNA, 19 nt, Artificial Sequence
  Description of Artificial Sequence: Synthetic oligonucleotide
uauguaccaaggauguuac

SEQ ID NO: 1426 - RNA, 19 nt, Artificial Sequence
  Description of Artificial Sequence: Synthetic oligonucleotide
auguaccaaggauguuaca

SEQ ID NO: 1427 - RNA, 19 nt, Artificial Sequence
  Description of Artificial Sequence: Synthetic oligonucleotide
uguaccaaggauguuacag

SEQ ID NO: 1428 - RNA, 19 nt, Artificial Sequence
  Description of Artificial Sequence: Synthetic oligonucleotide
guaccaaggauguuacagu

SEQ ID NO: 1429 - RNA, 19 nt, Artificial Sequence
  Description of Artificial Sequence: Synthetic oligonucleotide
uaccaaggauguuacagua

SEQ ID NO: 1430 - RNA, 19 nt, Artificial Sequence
  Description of Artificial Sequence: Synthetic oligonucleotide
accaaggauguuacaguaa

SEQ ID NO: 1431 - RNA, 19 nt, Artificial Sequence
  Description of Artificial Sequence: Synthetic oligonucleotide
ccaaggauguuacaguaaa

SEQ ID NO: 1432 - RNA, 19 nt, Artificial Sequence
  Description of Artificial Sequence: Synthetic oligonucleotide
caaggauguuacaguaaac

SEQ ID NO: 1433 - RNA, 19 nt, Artificial Sequence
  Description of Artificial Sequence: Synthetic oligonucleotide
aaggauguuacaguaaaca

SEQ ID NO: 1434 - RNA, 19 nt, Artificial Sequence
  Description of Artificial Sequence: Synthetic oligonucleotide
aggauguuacaguaaacag

SEQ ID NO: 1435 - RNA, 19 nt, Artificial Sequence
  Description of Artificial Sequence: Synthetic oligonucleotide
ggauguuacaguaaacagg

SEQ ID NO: 1436 - RNA, 19 nt, Artificial Sequence
  Description of Artificial Sequence: Synthetic oligonucleotide
gauguuacaguaaacagga

SEQ ID NO: 1437 - RNA, 19 nt, Artificial Sequence
  Description of Artificial Sequence: Synthetic oligonucleotide
auguuacaguaaacaggau

SEQ ID NO: 1438 - RNA, 19 nt, Artificial Sequence
  Description of Artificial Sequence: Synthetic oligonucleotide
uguuacaguaaacaggaug

SEQ ID NO: 1439 - RNA, 19 nt, Artificial Sequence
  Description of Artificial Sequence: Synthetic oligonucleotide
guuacaguaaacaggauga

SEQ ID NO: 1440 - RNA, 19 nt, Artificial Sequence
  Description of Artificial Sequence: Synthetic oligonucleotide
uuacaguaaacaggaugaa

SEQ ID NO: 1441 - RNA, 19 nt, Artificial Sequence
  Description of Artificial Sequence: Synthetic oligonucleotide
uacaguaaacaggaugaac

SEQ ID NO: 1442 - RNA, 19 nt, Artificial Sequence
  Description of Artificial Sequence: Synthetic oligonucleotide
acaguaaacaggaugaacu

SEQ ID NO: 1443 - RNA, 19 nt, Artificial Sequence
  Description of Artificial Sequence: Synthetic oligonucleotide
caguaaacaggaugaacua

SEQ ID NO: 1444 - RNA, 19 nt, Artificial Sequence
  Description of Artificial Sequence: Synthetic oligonucleotide
aguaaacaggaugaacuau

SEQ ID NO: 1445 - RNA, 19 nt, Artificial Sequence
  Description of Artificial Sequence: Synthetic oligonucleotide
guaaacaggaugaacuauu

SEQ ID NO: 1446 - RNA, 19 nt, Artificial Sequence
  Description of Artificial Sequence: Synthetic oligonucleotide
uaaacaggaugaacuauuu

SEQ ID NO: 1447 - RNA, 19 nt, Artificial Sequence
  Description of Artificial Sequence: Synthetic oligonucleotide
aaacaggaugaacuauuua

SEQ ID NO: 1448 - RNA, 19 nt, Artificial Sequence
  Description of Artificial Sequence: Synthetic oligonucleotide
aacaggaugaacuauuuaa

SEQ ID NO: 1449 - RNA, 19 nt, Artificial Sequence
  Description of Artificial Sequence: Synthetic oligonucleotide
acaggaugaacuauuuaaa

SEQ ID NO: 1450 - RNA, 19 nt, Artificial Sequence
  Description of Artificial Sequence: Synthetic oligonucleotide
caggaugaacuauuuaaac

SEQ ID NO: 1451 - RNA, 19 nt, Artificial Sequence
  Description of Artificial Sequence: Synthetic oligonucleotide
aggaugaacuauuuaaacc

SEQ ID NO: 1452 - RNA, 19 nt, Artificial Sequence
  Description of Artificial Sequence: Synthetic oligonucleotide
ggaugaacuauuuaaaccc

SEQ ID NO: 1453 - RNA, 19 nt, Artificial Sequence
  Description of Artificial Sequence: Synthetic oligonucleotide
gaugaacuauuuaaaccca

SEQ ID NO: 1454 - RNA, 19 nt, Artificial Sequence
  Description of Artificial Sequence: Synthetic oligonucleotide
augaacuauuuaaacccac

SEQ ID NO: 1455 - RNA, 19 nt, Artificial Sequence
  Description of Artificial Sequence: Synthetic oligonucleotide
ugaacuauuuaaacccacu

SEQ ID NO: 1456 - RNA, 19 nt, Artificial Sequence
  Description of Artificial Sequence: Synthetic oligonucleotide
gaacuauuuaaacccacug

SEQ ID NO: 1457 - RNA, 19 nt, Artificial Sequence
  Description of Artificial Sequence: Synthetic oligonucleotide
aacuauuuaaacccacugg

SEQ ID NO: 1458 - RNA, 19 nt, Artificial Sequence
  Description of Artificial Sequence: Synthetic oligonucleotide
acuauuuaaacccacuggg

SEQ ID NO: 1459 - RNA, 19 nt, Artificial Sequence
  Description of Artificial Sequence: Synthetic oligonucleotide
cuauuuaaacccacugggu

SEQ ID NO: 1460 - RNA, 19 nt, Artificial Sequence
  Description of Artificial Sequence: Synthetic oligonucleotide
uauuuaaacccacuggguc

SEQ ID NO: 1461 - RNA, 19 nt, Artificial Sequence
  Description of Artificial Sequence: Synthetic oligonucleotide
auuuaaacccacugggucc

SEQ ID NO: 1462 - RNA, 19 nt, Artificial Sequence
  Description of Artificial Sequence: Synthetic oligonucleotide
uuuaaacccacuggguccu

SEQ ID NO: 1463 - RNA, 19 nt, Artificial Sequence
  Description of Artificial Sequence: Synthetic oligonucleotide
uuaaacccacuggguccug

SEQ ID NO: 1464 - RNA, 19 nt, Artificial Sequence
  Description of Artificial Sequence: Synthetic oligonucleotide
uaaacccacuggguccugc

SEQ ID NO: 1465 - RNA, 19 nt, Artificial Sequence
  Description of Artificial Sequence: Synthetic oligonucleotide
aaacccacuggguccugcc

SEQ ID NO: 1466 - RNA, 19 nt, Artificial Sequence
  Description of Artificial Sequence: Synthetic oligonucleotide
aacccacuggguccugcca

SEQ ID NO: 1467 - RNA, 19 nt, Artificial Sequence
  Description of Artificial Sequence: Synthetic oligonucleotide
acccacuggguccugccac

SEQ ID NO: 1468 - RNA, 19 nt, Artificial Sequence
  Description of Artificial Sequence: Synthetic oligonucleotide
cccacuggguccugccaca

SEQ ID NO: 1469 - RNA, 19 nt, Artificial Sequence
  Description of Artificial Sequence: Synthetic oligonucleotide
ccacuggguccugccacau

SEQ ID NO: 1470 - RNA, 19 nt, Artificial Sequence
  Description of Artificial Sequence: Synthetic oligonucleotide
cacuggguccugccacauc

SEQ ID NO: 1471 - RNA, 19 nt, Artificial Sequence
  Description of Artificial Sequence: Synthetic oligonucleotide
acuggguccugccacaucc

SEQ ID NO: 1472 - RNA, 19 nt, Artificial Sequence
  Description of Artificial Sequence: Synthetic oligonucleotide
cuggguccugccacauccu

SEQ ID NO: 1473 - RNA, 19 nt, Artificial Sequence
  Description of Artificial Sequence: Synthetic oligonucleotide
uggguccugccacauccuu

SEQ ID NO: 1474 - RNA, 19 nt, Artificial Sequence
  Description of Artificial Sequence: Synthetic oligonucleotide
ggguccugccacauccuuc

SEQ ID NO: 1475 - RNA, 19 nt, Artificial Sequence
  Description of Artificial Sequence: Synthetic oligonucleotide
gguccugccacauccuucu

SEQ ID NO: 1476 - RNA, 19 nt, Artificial Sequence
  Description of Artificial Sequence: Synthetic oligonucleotide
guccugccacauccuucuc

SEQ ID NO: 1477 - RNA, 19 nt, Artificial Sequence
  Description of Artificial Sequence: Synthetic oligonucleotide
uccugccacauccuucuca

SEQ ID NO: 1478 - RNA, 19 nt, Artificial Sequence
  Description of Artificial Sequence: Synthetic oligonucleotide
ccugccacauccuucucaa

SEQ ID NO: 1479 - RNA, 19 nt, Artificial Sequence
  Description of Artificial Sequence: Synthetic oligonucleotide
cugccacauccuucucaag

SEQ ID NO: 1480 - RNA, 19 nt, Artificial Sequence
  Description of Artificial Sequence: Synthetic oligonucleotide
ugccacauccuucucaagg

SEQ ID NO: 1481 - RNA, 19 nt, Artificial Sequence
  Description of Artificial Sequence: Synthetic oligonucleotide
gccacauccuucucaaggu

SEQ ID NO: 1482 - RNA, 19 nt, Artificial Sequence
  Description of Artificial Sequence: Synthetic oligonucleotide
ccacauccuucucaaggug

SEQ ID NO: 1483 - RNA, 19 nt, Artificial Sequence
  Description of Artificial Sequence: Synthetic oligonucleotide
cacauccuucucaaggugg

SEQ ID NO: 1484 - RNA, 19 nt, Artificial Sequence
  Description of Artificial Sequence: Synthetic oligonucleotide
acauccuucucaagguggu

SEQ ID NO: 1485 - RNA, 19 nt, Artificial Sequence
  Description of Artificial Sequence: Synthetic oligonucleotide
cauccuucucaagguggua

SEQ ID NO: 1486 - RNA, 19 nt, Artificial Sequence
  Description of Artificial Sequence: Synthetic oligonucleotide
auccuucucaaggugguag

SEQ ID NO: 1487 - RNA, 19 nt, Artificial Sequence
  Description of Artificial Sequence: Synthetic oligonucleotide
uccuucucaaggugguaga

SEQ ID NO: 1488 - RNA, 19 nt, Artificial Sequence
  Description of Artificial Sequence: Synthetic oligonucleotide
ccuucucaaggugguagac

SEQ ID NO: 1489 - RNA, 19 nt, Artificial Sequence
  Description of Artificial Sequence: Synthetic oligonucleotide
cuucucaaggugguagacu

SEQ ID NO: 1490 - RNA, 19 nt, Artificial Sequence
  Description of Artificial Sequence: Synthetic oligonucleotide
uucucaaggugguagacug

SEQ ID NO: 1491 - RNA, 19 nt, Artificial Sequence
  Description of Artificial Sequence: Synthetic oligonucleotide
ucucaaggugguagacuga

SEQ ID NO: 1492 - RNA, 19 nt, Artificial Sequence
  Description of Artificial Sequence: Synthetic oligonucleotide
cucaaggugguagacugag

SEQ ID NO: 1493 - RNA, 19 nt, Artificial Sequence
  Description of Artificial Sequence: Synthetic oligonucleotide
ucaaggugguagacugagu

SEQ ID NO: 1494 - RNA, 19 nt, Artificial Sequence
  Description of Artificial Sequence: Synthetic oligonucleotide
caaggugguagacugagug

SEQ ID NO: 1495 - RNA, 19 nt, Artificial Sequence
  Description of Artificial Sequence: Synthetic oligonucleotide
aaggugguagacugagugg

SEQ ID NO: 1496 - RNA, 19 nt, Artificial Sequence
  Description of Artificial Sequence: Synthetic oligonucleotide
aggugguagacugaguggg

SEQ ID NO: 1497 - RNA, 19 nt, Artificial Sequence
  Description of Artificial Sequence: Synthetic oligonucleotide
ggugguagacugagugggg

SEQ ID NO: 1498 - RNA, 19 nt, Artificial Sequence
  Description of Artificial Sequence: Synthetic oligonucleotide
gugguagacugaguggggu

SEQ ID NO: 1499 - RNA, 19 nt, Artificial Sequence
  Description of Artificial Sequence: Synthetic oligonucleotide
ugguagacugagugggguc

SEQ ID NO: 1500 - RNA, 19 nt, Artificial Sequence
  Description of Artificial Sequence: Synthetic oligonucleotide
gguagacugaguggggucu

SEQ ID NO: 1501 - RNA, 19 nt, Artificial Sequence
  Description of Artificial Sequence: Synthetic oligonucleotide
guagacugaguggggucuc

SEQ ID NO: 1502 - RNA, 19 nt, Artificial Sequence
  Description of Artificial Sequence: Synthetic oligonucleotide
uagacugaguggggucucu

SEQ ID NO: 1503 - RNA, 19 nt, Artificial Sequence
  Description of Artificial Sequence: Synthetic oligonucleotide
agacugaguggggucucuc

SEQ ID NO: 1504 - RNA, 19 nt, Artificial Sequence
  Description of Artificial Sequence: Synthetic oligonucleotide
gacugaguggggucucucu

SEQ ID NO: 1505 - RNA, 19 nt, Artificial Sequence
  Description of Artificial Sequence: Synthetic oligonucleotide
acugaguggggucucucug

SEQ ID NO: 1506 - RNA, 19 nt, Artificial Sequence
  Description of Artificial Sequence: Synthetic oligonucleotide
cugaguggggucucucugc

SEQ ID NO: 1507 - RNA, 19 nt, Artificial Sequence
  Description of Artificial Sequence: Synthetic oligonucleotide
ugaguggggucucucugcc

SEQ ID NO: 1508 - RNA, 19 nt, Artificial Sequence
  Description of Artificial Sequence: Synthetic oligonucleotide
gaguggggucucucugccc

SEQ ID NO: 1509 - RNA, 19 nt, Artificial Sequence
  Description of Artificial Sequence: Synthetic oligonucleotide
aguggggucucucugccca

SEQ ID NO: 1510 - RNA, 19 nt, Artificial Sequence
  Description of Artificial Sequence: Synthetic oligonucleotide
guggggucucucugcccaa

SEQ ID NO: 1511 - RNA, 19 nt, Artificial Sequence
  Description of Artificial Sequence: Synthetic oligonucleotide
uggggucucucugcccaag

SEQ ID NO: 1512 - RNA, 19 nt, Artificial Sequence
  Description of Artificial Sequence: Synthetic oligonucleotide
ggggucucucugcccaaga

SEQ ID NO: 1513 - RNA, 19 nt, Artificial Sequence
  Description of Artificial Sequence: Synthetic oligonucleotide
gggucucucugcccaagau

SEQ ID NO: 1514 - RNA, 19 nt, Artificial Sequence
  Description of Artificial Sequence: Synthetic oligonucleotide
ggucucucugcccaagauc

SEQ ID NO: 1515 - RNA, 19 nt, Artificial Sequence
  Description of Artificial Sequence: Synthetic oligonucleotide
gucucucugcccaagaucc

SEQ ID NO: 1516 - RNA, 19 nt, Artificial Sequence
  Description of Artificial Sequence: Synthetic oligonucleotide
ucucucugcccaagauccc

SEQ ID NO: 1517 - RNA, 19 nt, Artificial Sequence
  Description of Artificial Sequence: Synthetic oligonucleotide
cucucugcccaagaucccu

SEQ ID NO: 1518 - RNA, 19 nt, Artificial Sequence
  Description of Artificial Sequence: Synthetic oligonucleotide
ucucugcccaagaucccug

SEQ ID NO: 1519 - RNA, 19 nt, Artificial Sequence
  Description of Artificial Sequence: Synthetic oligonucleotide
cucugcccaagaucccuga

SEQ ID NO: 1520 - RNA, 19 nt, Artificial Sequence
  Description of Artificial Sequence: Synthetic oligonucleotide
ucugcccaagaucccugac

SEQ ID NO: 1521 - RNA, 19 nt, Artificial Sequence
  Description of Artificial Sequence: Synthetic oligonucleotide
cugcccaagaucccugaca

SEQ ID NO: 1522 - RNA, 19 nt, Artificial Sequence
  Description of Artificial Sequence: Synthetic oligonucleotide
ugcccaagaucccugacau

SEQ ID NO: 1523 - RNA, 19 nt, Artificial Sequence
  Description of Artificial Sequence: Synthetic oligonucleotide
gcccaagaucccugacaua

SEQ ID NO: 1524 - RNA, 19 nt, Artificial Sequence
  Description of Artificial Sequence: Synthetic oligonucleotide
cccaagaucccugacauag

SEQ ID NO: 1525 - RNA, 19 nt, Artificial Sequence
  Description of Artificial Sequence: Synthetic oligonucleotide
ccaagaucccugacauagc

SEQ ID NO: 1526 - RNA, 19 nt, Artificial Sequence
  Description of Artificial Sequence: Synthetic oligonucleotide
caagaucccugacauagca

SEQ ID NO: 1527 - RNA, 19 nt, Artificial Sequence
  Description of Artificial Sequence: Synthetic oligonucleotide
aagaucccugacauagcag

SEQ ID NO: 1528 - RNA, 19 nt, Artificial Sequence
  Description of Artificial Sequence: Synthetic oligonucleotide
agaucccugacauagcagu

SEQ ID NO: 1529 - RNA, 19 nt, Artificial Sequence
  Description of Artificial Sequence: Synthetic oligonucleotide
gaucccugacauagcagua

SEQ ID NO: 1530 - RNA, 19 nt, Artificial Sequence
  Description of Artificial Sequence: Synthetic oligonucleotide
aucccugacauagcaguag

SEQ ID NO: 1531 - RNA, 19 nt, Artificial Sequence
  Description of Artificial Sequence: Synthetic oligonucleotide
ucccugacauagcaguagc

SEQ ID NO: 1532 - RNA, 19 nt, Artificial Sequence
  Description of Artificial Sequence: Synthetic oligonucleotide
cccugacauagcaguagcu

SEQ ID NO: 1533 - RNA, 19 nt, Artificial Sequence
  Description of Artificial Sequence: Synthetic oligonucleotide
ccugacauagcaguagcuu

SEQ ID NO: 1534 - RNA, 19 nt, Artificial Sequence
  Description of Artificial Sequence: Synthetic oligonucleotide
cugacauagcaguagcuug

SEQ ID NO: 1535 - RNA, 19 nt, Artificial Sequence
  Description of Artificial Sequence: Synthetic oligonucleotide
ugacauagcaguagcuugu

SEQ ID NO: 1536 - RNA, 19 nt, Artificial Sequence
  Description of Artificial Sequence: Synthetic oligonucleotide
gacauagcaguagcuuguc

SEQ ID NO: 1537 - RNA, 19 nt, Artificial Sequence
  Description of Artificial Sequence: Synthetic oligonucleotide
acauagcaguagcuugucu

SEQ ID NO: 1538 - RNA, 19 nt, Artificial Sequence
  Description of Artificial Sequence: Synthetic oligonucleotide
cauagcaguagcuugucuu

SEQ ID NO: 1539 - RNA, 19 nt, Artificial Sequence
  Description of Artificial Sequence: Synthetic oligonucleotide
auagcaguagcuugucuuu

SEQ ID NO: 1540 - RNA, 19 nt, Artificial Sequence
  Description of Artificial Sequence: Synthetic oligonucleotide
uagcaguagcuugucuuuu

SEQ ID NO: 1541 - RNA, 19 nt, Artificial Sequence
  Description of Artificial Sequence: Synthetic oligonucleotide
agcaguagcuugucuuuuc

SEQ ID NO: 1542 - RNA, 19 nt, Artificial Sequence
  Description of Artificial Sequence: Synthetic oligonucleotide
gcaguagcuugucuuuucc

SEQ ID NO: 1543 - RNA, 19 nt, Artificial Sequence
  Description of Artificial Sequence: Synthetic oligonucleotide
caguagcuugucuuuucca

SEQ ID NO: 1544 - RNA, 19 nt, Artificial Sequence
  Description of Artificial Sequence: Synthetic oligonucleotide
aguagcuugucuuuuccac

SEQ ID NO: 1545 - RNA, 19 nt, Artificial Sequence
  Description of Artificial Sequence: Synthetic oligonucleotide
guagcuugucuuuuccaca

SEQ ID NO: 1546 - RNA, 19 nt, Artificial Sequence
  Description of Artificial Sequence: Synthetic oligonucleotide
uagcuugucuuuuccacau

SEQ ID NO: 1547 - RNA, 19 nt, Artificial Sequence
  Description of Artificial Sequence: Synthetic oligonucleotide
agcuugucuuuuccacaug

SEQ ID NO: 1548 - RNA, 19 nt, Artificial Sequence
  Description of Artificial Sequence: Synthetic oligonucleotide
gcuugucuuuuccacauga

SEQ ID NO: 1549 - RNA, 19 nt, Artificial Sequence
  Description of Artificial Sequence: Synthetic oligonucleotide
cuugucuuuuccacaugau

SEQ ID NO: 1550 - RNA, 19 nt, Artificial Sequence
  Description of Artificial Sequence: Synthetic oligonucleotide
uugucuuuuccacaugauu

SEQ ID NO: 1551 - RNA, 19 nt, Artificial Sequence
  Description of Artificial Sequence: Synthetic oligonucleotide
ugucuuuuccacaugauuu

SEQ ID NO: 1552 - RNA, 19 nt, Artificial Sequence
  Description of Artificial Sequence: Synthetic oligonucleotide
gucuuuuccacaugauuug

SEQ ID NO: 1553 - RNA, 19 nt, Artificial Sequence
  Description of Artificial Sequence: Synthetic oligonucleotide
ucuuuuccacaugauuugu

SEQ ID NO: 1554 - RNA, 19 nt, Artificial Sequence
  Description of Artificial Sequence: Synthetic oligonucleotide
cuuuuccacaugauuuguc

SEQ ID NO: 1555 - RNA, 19 nt, Artificial Sequence
  Description of Artificial Sequence: Synthetic oligonucleotide
uuuuccacaugauuugucu

SEQ ID NO: 1556 - RNA, 19 nt, Artificial Sequence
  Description of Artificial Sequence: Synthetic oligonucleotide
uuuccacaugauuugucug

SEQ ID NO: 1557 - RNA, 19 nt, Artificial Sequence
  Description of Artificial Sequence: Synthetic oligonucleotide
uuccacaugauuugucugu

SEQ ID NO: 1558 - RNA, 19 nt, Artificial Sequence
  Description of Artificial Sequence: Synthetic oligonucleotide
uccacaugauuugucugug

SEQ ID NO: 1559 - RNA, 19 nt, Artificial Sequence
  Description of Artificial Sequence: Synthetic oligonucleotide
ccacaugauuugucuguga

SEQ ID NO: 1560 - RNA, 19 nt, Artificial Sequence
  Description of Artificial Sequence: Synthetic oligonucleotide
cacaugauuugucugugaa

SEQ ID NO: 1561 - RNA, 19 nt, Artificial Sequence
  Description of Artificial Sequence: Synthetic oligonucleotide
acaugauuugucugugaaa

SEQ ID NO: 1562 - RNA, 19 nt, Artificial Sequence
  Description of Artificial Sequence: Synthetic oligonucleotide
caugauuugucugugaaag

SEQ ID NO: 1563 - RNA, 19 nt, Artificial Sequence
  Description of Artificial Sequence: Synthetic oligonucleotide
augauuugucugugaaaga

SEQ ID NO: 1564 - RNA, 19 nt, Artificial Sequence
  Description of Artificial Sequence: Synthetic oligonucleotide
ugauuugucugugaaagaa

SEQ ID NO: 1565 - RNA, 19 nt, Artificial Sequence
  Description of Artificial Sequence: Synthetic oligonucleotide
gauuugucugugaaagaaa

SEQ ID NO: 1566 - RNA, 19 nt, Artificial Sequence
  Description of Artificial Sequence: Synthetic oligonucleotide
auuugucugugaaagaaaa

SEQ ID NO: 1567 - RNA, 19 nt, Artificial Sequence
  Description of Artificial Sequence: Synthetic oligonucleotide
uuugucugugaaagaaaau

SEQ ID NO: 1568 - RNA, 19 nt, Artificial Sequence
  Description of Artificial Sequence: Synthetic oligonucleotide
uugucugugaaagaaaaua

SEQ ID NO: 1569 - RNA, 19 nt, Artificial Sequence
  Description of Artificial Sequence: Synthetic oligonucleotide
ugucugugaaagaaaauaa

SEQ ID NO: 1570 - RNA, 19 nt, Artificial Sequence
  Description of Artificial Sequence: Synthetic oligonucleotide
gucugugaaagaaaauaau

SEQ ID NO: 1571 - RNA, 19 nt, Artificial Sequence
  Description of Artificial Sequence: Synthetic oligonucleotide
ucugugaaagaaaauaauu

SEQ ID NO: 1572 - RNA, 19 nt, Artificial Sequence
  Description of Artificial Sequence: Synthetic oligonucleotide
cugugaaagaaaauaauuu

SEQ ID NO: 1573 - RNA, 19 nt, Artificial Sequence
  Description of Artificial Sequence: Synthetic oligonucleotide
ugugaaagaaaauaauuuu

SEQ ID NO: 1574 - RNA, 19 nt, Artificial Sequence
  Description of Artificial Sequence: Synthetic oligonucleotide
gugaaagaaaauaauuuug

SEQ ID NO: 1575 - RNA, 19 nt, Artificial Sequence
  Description of Artificial Sequence: Synthetic oligonucleotide
ugaaagaaaauaauuuuga

SEQ ID NO: 1576 - RNA, 19 nt, Artificial Sequence
  Description of Artificial Sequence: Synthetic oligonucleotide
gaaagaaaauaauuuugag

SEQ ID NO: 1577 - RNA, 19 nt, Artificial Sequence
  Description of Artificial Sequence: Synthetic oligonucleotide
aaagaaaauaauuuugaga

SEQ ID NO: 1578 - RNA, 19 nt, Artificial Sequence
  Description of Artificial Sequence: Synthetic oligonucleotide
aagaaaauaauuuugagau

SEQ ID NO: 1579 - RNA, 19 nt, Artificial Sequence
  Description of Artificial Sequence: Synthetic oligonucleotide
agaaaauaauuuugagauc

SEQ ID NO: 1580 - RNA, 19 nt, Artificial Sequence
  Description of Artificial Sequence: Synthetic oligonucleotide
gaaaauaauuuugagaucg

SEQ ID NO: 1581 - RNA, 19 nt, Artificial Sequence
  Description of Artificial Sequence: Synthetic oligonucleotide
aaaauaauuuugagaucgu

SEQ ID NO: 1582 - RNA, 19 nt, Artificial Sequence
  Description of Artificial Sequence: Synthetic oligonucleotide
aaauaauuuugagaucguu

SEQ ID NO: 1583 - RNA, 19 nt, Artificial Sequence
  Description of Artificial Sequence: Synthetic oligonucleotide
aauaauuuugagaucguuu

SEQ ID NO: 1584 - RNA, 19 nt, Artificial Sequence
  Description of Artificial Sequence: Synthetic oligonucleotide
auaauuuugagaucguuuu

SEQ ID NO: 1585 - RNA, 19 nt, Artificial Sequence
  Description of Artificial Sequence: Synthetic oligonucleotide
uaauuuugagaucguuuua

SEQ ID NO: 1586 - RNA, 19 nt, Artificial Sequence
  Description of Artificial Sequence: Synthetic oligonucleotide
aauuuugagaucguuuuau

SEQ ID NO: 1587 - RNA, 19 nt, Artificial Sequence
  Description of Artificial Sequence: Synthetic oligonucleotide
auuuugagaucguuuuauc

SEQ ID NO: 1588 - RNA, 19 nt, Artificial Sequence
  Description of Artificial Sequence: Synthetic oligonucleotide
uuuugagaucguuuuaucu

SEQ ID NO: 1589 - RNA, 19 nt, Artificial Sequence
  Description of Artificial Sequence: Synthetic oligonucleotide
uuugagaucguuuuaucua

SEQ ID NO: 1590 - RNA, 19 nt, Artificial Sequence
  Description of Artificial Sequence: Synthetic oligonucleotide
uugagaucguuuuaucuau

SEQ ID NO: 1591 - RNA, 19 nt, Artificial Sequence
  Description of Artificial Sequence: Synthetic oligonucleotide
ugagaucguuuuaucuauu

SEQ ID NO: 1592 - RNA, 19 nt, Artificial Sequence
  Description of Artificial Sequence: Synthetic oligonucleotide
gagaucguuuuaucuauuu

SEQ ID NO: 1593 - RNA, 19 nt, Artificial Sequence
  Description of Artificial Sequence: Synthetic oligonucleotide
agaucguuuuaucuauuuu

SEQ ID NO: 1594 - RNA, 19 nt, Artificial Sequence
  Description of Artificial Sequence: Synthetic oligonucleotide
gaucguuuuaucuauuuuc

SEQ ID NO: 1595 - RNA, 19 nt, Artificial Sequence
  Description of Artificial Sequence: Synthetic oligonucleotide
aucguuuuaucuauuuucu

SEQ ID NO: 1596 - RNA, 19 nt, Artificial Sequence
  Description of Artificial Sequence: Synthetic oligonucleotide
ucguuuuaucuauuuucuc

SEQ ID NO: 1597 - RNA, 19 nt, Artificial Sequence
  Description of Artificial Sequence: Synthetic oligonucleotide
cguuuuaucuauuuucucu

SEQ ID NO: 1598 - RNA, 19 nt, Artificial Sequence
  Description of Artificial Sequence: Synthetic oligonucleotide
guuuuaucuauuuucucua

SEQ ID NO: 1599 - RNA, 19 nt, Artificial Sequence
  Description of Artificial Sequence: Synthetic oligonucleotide
uuuuaucuauuuucucuac

SEQ ID NO: 1600 - RNA, 19 nt, Artificial Sequence
  Description of Artificial Sequence: Synthetic oligonucleotide
uuuaucuauuuucucuacg

SEQ ID NO: 1601 - RNA, 19 nt, Artificial Sequence
  Description of Artificial Sequence: Synthetic oligonucleotide
uuaucuauuuucucuacgg

SEQ ID NO: 1602 - RNA, 19 nt, Artificial Sequence
  Description of Artificial Sequence: Synthetic oligonucleotide
uaucuauuuucucuacggc

SEQ ID NO: 1603 - RNA, 19 nt, Artificial Sequence
  Description of Artificial Sequence: Synthetic oligonucleotide
aucuauuuucucuacggcu

SEQ ID NO: 1604 - RNA, 19 nt, Artificial Sequence
  Description of Artificial Sequence: Synthetic oligonucleotide
ucuauuuucucuacggcuu

SEQ ID NO: 1605 - RNA, 19 nt, Artificial Sequence
  Description of Artificial Sequence: Synthetic oligonucleotide
cuauuuucucuacggcuua

SEQ ID NO: 1606 - RNA, 19 nt, Artificial Sequence
  Description of Artificial Sequence: Synthetic oligonucleotide
uauuuucucuacggcuuag

SEQ ID NO: 1607 - RNA, 19 nt, Artificial Sequence
  Description of Artificial Sequence: Synthetic oligonucleotide
auuuucucuacggcuuagg

SEQ ID NO: 1608 - RNA, 19 nt, Artificial Sequence
  Description of Artificial Sequence: Synthetic oligonucleotide
uuuucucuacggcuuaggc

SEQ ID NO: 1609 - RNA, 19 nt, Artificial Sequence
  Description of Artificial Sequence: Synthetic oligonucleotide
uuucucuacggcuuaggcu

SEQ ID NO: 1610 - RNA, 19 nt, Artificial Sequence
  Description of Artificial Sequence: Synthetic oligonucleotide
uucucuacggcuuaggcua

SEQ ID NO: 1611 - RNA, 19 nt, Artificial Sequence
  Description of Artificial Sequence: Synthetic oligonucleotide
ucucuacggcuuaggcuau

SEQ ID NO: 1612 - RNA, 19 nt, Artificial Sequence
  Description of Artificial Sequence: Synthetic oligonucleotide
cucuacggcuuaggcuaug

SEQ ID NO: 1613 - RNA, 19 nt, Artificial Sequence
  Description of Artificial Sequence: Synthetic oligonucleotide
ucuacggcuuaggcuaugu

SEQ ID NO: 1614 - RNA, 19 nt, Artificial Sequence
  Description of Artificial Sequence: Synthetic oligonucleotide
cuacggcuuaggcuaugug

SEQ ID NO: 1615 - RNA, 19 nt, Artificial Sequence
  Description of Artificial Sequence: Synthetic oligonucleotide
uacggcuuaggcuauguga

SEQ ID NO: 1616 - RNA, 19 nt, Artificial Sequence
  Description of Artificial Sequence: Synthetic oligonucleotide
acggcuuaggcuaugugag

SEQ ID NO: 1617 - RNA, 19 nt, Artificial Sequence
  Description of Artificial Sequence: Synthetic oligonucleotide
cggcuuaggcuaugugagg

SEQ ID NO: 1618 - RNA, 19 nt, Artificial Sequence
  Description of Artificial Sequence: Synthetic oligonucleotide
ggcuuaggcuaugugaggg

SEQ ID NO: 1619 - RNA, 19 nt, Artificial Sequence
  Description of Artificial Sequence: Synthetic oligonucleotide
gcuuaggcuaugugagggc

SEQ ID NO: 1620 - RNA, 19 nt, Artificial Sequence
  Description of Artificial Sequence: Synthetic oligonucleotide
cuuaggcuaugugagggca

SEQ ID NO: 1621 - RNA, 19 nt, Artificial Sequence
  Description of Artificial Sequence: Synthetic oligonucleotide
uuaggcuaugugagggcaa

SEQ ID NO: 1622 - RNA, 19 nt, Artificial Sequence
  Description of Artificial Sequence: Synthetic oligonucleotide
uaggcuaugugagggcaaa

SEQ ID NO: 1623 - RNA, 19 nt, Artificial Sequence
  Description of Artificial Sequence: Synthetic oligonucleotide
aggcuaugugagggcaaaa

SEQ ID NO: 1624 - RNA, 19 nt, Artificial Sequence
  Description of Artificial Sequence: Synthetic oligonucleotide
ggcuaugugagggcaaaac

SEQ ID NO: 1625 - RNA, 19 nt, Artificial Sequence
  Description of Artificial Sequence: Synthetic oligonucleotide
gcuaugugagggcaaaaca

SEQ ID NO: 1626 - RNA, 19 nt, Artificial Sequence
  Description of Artificial Sequence: Synthetic oligonucleotide
cuaugugagggcaaaacac

SEQ ID NO: 1627 - RNA, 19 nt, Artificial Sequence
  Description of Artificial Sequence: Synthetic oligonucleotide
uaugugagggcaaaacaca

SEQ ID NO: 1628 - RNA, 19 nt, Artificial Sequence
  Description of Artificial Sequence: Synthetic oligonucleotide
augugagggcaaaacacaa

SEQ ID NO: 1629 - RNA, 19 nt, Artificial Sequence
  Description of Artificial Sequence: Synthetic oligonucleotide
ugugagggcaaaacacaaa

SEQ ID NO: 1630 - RNA, 19 nt, Artificial Sequence
  Description of Artificial Sequence: Synthetic oligonucleotide
gugagggcaaaacacaaau

SEQ ID NO: 1631 - RNA, 19 nt, Artificial Sequence
  Description of Artificial Sequence: Synthetic oligonucleotide
ugagggcaaaacacaaauc

SEQ ID NO: 1632 - RNA, 19 nt, Artificial Sequence
  Description of Artificial Sequence: Synthetic oligonucleotide
gagggcaaaacacaaaucc

SEQ ID NO: 1633 - RNA, 19 nt, Artificial Sequence
  Description of Artificial Sequence: Synthetic oligonucleotide
agggcaaaacacaaauccc

SEQ ID NO: 1634 - RNA, 19 nt, Artificial Sequence
  Description of Artificial Sequence: Synthetic oligonucleotide
gggcaaaacacaaaucccu

SEQ ID NO: 1635 - RNA, 19 nt, Artificial Sequence
  Description of Artificial Sequence: Synthetic oligonucleotide
ggcaaaacacaaaucccuu

SEQ ID NO: 1636 - RNA, 19 nt, Artificial Sequence
  Description of Artificial Sequence: Synthetic oligonucleotide
gcaaaacacaaaucccuuu

SEQ ID NO: 1637 - RNA, 19 nt, Artificial Sequence
  Description of Artificial Sequence: Synthetic oligonucleotide
caaaacacaaaucccuuug

SEQ ID NO: 1638 - RNA, 19 nt, Artificial Sequence
  Description of Artificial Sequence: Synthetic oligonucleotide
aaaacacaaaucccuuugc

SEQ ID NO: 1639 - RNA, 19 nt, Artificial Sequence
  Description of Artificial Sequence: Synthetic oligonucleotide
aaacacaaaucccuuugcu

SEQ ID NO: 1640 - RNA, 19 nt, Artificial Sequence
  Description of Artificial Sequence: Synthetic oligonucleotide
aacacaaaucccuuugcua

SEQ ID NO: 1641 - RNA, 19 nt, Artificial Sequence
  Description of Artificial Sequence: Synthetic oligonucleotide
acacaaaucccuuugcuaa

SEQ ID NO: 1642 - RNA, 19 nt, Artificial Sequence
  Description of Artificial Sequence: Synthetic oligonucleotide
cacaaaucccuuugcuaaa

SEQ ID NO: 1643 - RNA, 19 nt, Artificial Sequence
  Description of Artificial Sequence: Synthetic oligonucleotide
acaaaucccuuugcuaaaa

SEQ ID NO: 1644 - RNA, 19 nt, Artificial Sequence
  Description of Artificial Sequence: Synthetic oligonucleotide
caaaucccuuugcuaaaaa

SEQ ID NO: 1645 - RNA, 19 nt, Artificial Sequence
  Description of Artificial Sequence: Synthetic oligonucleotide
aaaucccuuugcuaaaaag

SEQ ID NO: 1646 - RNA, 19 nt, Artificial Sequence
  Description of Artificial Sequence: Synthetic oligonucleotide
aaucccuuugcuaaaaaga

SEQ ID NO: 1647 - RNA, 19 nt, Artificial Sequence
  Description of Artificial Sequence: Synthetic oligonucleotide
aucccuuugcuaaaaagaa

SEQ ID NO: 1648 - RNA, 19 nt, Artificial Sequence
  Description of Artificial Sequence: Synthetic oligonucleotide
ucccuuugcuaaaaagaac

SEQ ID NO: 1649 - RNA, 19 nt, Artificial Sequence
  Description of Artificial Sequence: Synthetic oligonucleotide
cccuuugcuaaaaagaacc

SEQ ID NO: 1650 - RNA, 19 nt, Artificial Sequence
  Description of Artificial Sequence: Synthetic oligonucleotide
ccuuugcuaaaaagaacca

SEQ ID NO: 1651 - RNA, 19 nt, Artificial Sequence
  Description of Artificial Sequence: Synthetic oligonucleotide
cuuugcuaaaaagaaccau

SEQ ID NO: 1652 - RNA, 19 nt, Artificial Sequence
  Description of Artificial Sequence: Synthetic oligonucleotide
uuugcuaaaaagaaccaua

SEQ ID NO: 1653 - RNA, 19 nt, Artificial Sequence
  Description of Artificial Sequence: Synthetic oligonucleotide
uugcuaaaaagaaccauau

SEQ ID NO: 1654 - RNA, 19 nt, Artificial Sequence
  Description of Artificial Sequence: Synthetic oligonucleotide
ugcuaaaaagaaccauauu

SEQ ID NO: 1655 - RNA, 19 nt, Artificial Sequence
  Description of Artificial Sequence: Synthetic oligonucleotide
gcuaaaaagaaccauauua

SEQ ID NO: 1656 - RNA, 19 nt, Artificial Sequence
  Description of Artificial Sequence: Synthetic oligonucleotide
cuaaaaagaaccauauuau

SEQ ID NO: 1657 - RNA, 19 nt, Artificial Sequence
  Description of Artificial Sequence: Synthetic oligonucleotide
uaaaaagaaccauauuauu

SEQ ID NO: 1658 - RNA, 19 nt, Artificial Sequence
  Description of Artificial Sequence: Synthetic oligonucleotide
aaaaagaaccauauuauuu

SEQ ID NO: 1659 - RNA, 19 nt, Artificial Sequence
  Description of Artificial Sequence: Synthetic oligonucleotide
aaaagaaccauauuauuuu

SEQ ID NO: 1660 - RNA, 19 nt, Artificial Sequence
  Description of Artificial Sequence: Synthetic oligonucleotide
aaagaaccauauuauuuug

SEQ ID NO: 1661 - RNA, 19 nt, Artificial Sequence
  Description of Artificial Sequence: Synthetic oligonucleotide
aagaaccauauuauuuuga

SEQ ID NO: 1662 - RNA, 19 nt, Artificial Sequence
  Description of Artificial Sequence: Synthetic oligonucleotide
agaaccauauuauuuugau

SEQ ID NO: 1663 - RNA, 19 nt, Artificial Sequence
  Description of Artificial Sequence: Synthetic oligonucleotide
gaaccauauuauuuugauu

SEQ ID NO: 1664 - RNA, 19 nt, Artificial Sequence
  Description of Artificial Sequence: Synthetic oligonucleotide
aaccauauuauuuugauuc

SEQ ID NO: 1665 - RNA, 19 nt, Artificial Sequence
  Description of Artificial Sequence: Synthetic oligonucleotide
accauauuauuuugauucu

SEQ ID NO: 1666 - RNA, 19 nt, Artificial Sequence
  Description of Artificial Sequence: Synthetic oligonucleotide
ccauauuauuuugauucuc

SEQ ID NO: 1667 - RNA, 19 nt, Artificial Sequence
  Description of Artificial Sequence: Synthetic oligonucleotide
cauauuauuuugauucuca

SEQ ID NO: 1668 - RNA, 19 nt, Artificial Sequence
  Description of Artificial Sequence: Synthetic oligonucleotide
auauuauuuugauucucaa

SEQ ID NO: 1669 - RNA, 19 nt, Artificial Sequence
  Description of Artificial Sequence: Synthetic oligonucleotide
uauuauuuugauucucaaa

SEQ ID NO: 1670 - RNA, 19 nt, Artificial Sequence
  Description of Artificial Sequence: Synthetic oligonucleotide
auuauuuugauucucaaag

SEQ ID NO: 1671 - RNA, 19 nt, Artificial Sequence
  Description of Artificial Sequence: Synthetic oligonucleotide
uuauuuugauucucaaagg

SEQ ID NO: 1672 - RNA, 19 nt, Artificial Sequence
  Description of Artificial Sequence: Synthetic oligonucleotide
uauuuugauucucaaagga

SEQ ID NO: 1673 - RNA, 19 nt, Artificial Sequence
  Description of Artificial Sequence: Synthetic oligonucleotide
auuuugauucucaaaggau

SEQ ID NO: 1674 - RNA, 19 nt, Artificial Sequence
  Description of Artificial Sequence: Synthetic oligonucleotide
uuuugauucucaaaggaua

SEQ ID NO: 1675 - RNA, 19 nt, Artificial Sequence
  Description of Artificial Sequence: Synthetic oligonucleotide
uuugauucucaaaggauag

SEQ ID NO: 1676 - RNA, 19 nt, Artificial Sequence
  Description of Artificial Sequence: Synthetic oligonucleotide
uugauucucaaaggauagg

SEQ ID NO: 1677 - RNA, 19 nt, Artificial Sequence
  Description of Artificial Sequence: Synthetic oligonucleotide
ugauucucaaaggauaggc

SEQ ID NO: 1678 - RNA, 19 nt, Artificial Sequence
  Description of Artificial Sequence: Synthetic oligonucleotide
gauucucaaaggauaggcc

SEQ ID NO: 1679 - RNA, 19 nt, Artificial Sequence
  Description of Artificial Sequence: Synthetic oligonucleotide
auucucaaaggauaggccu

SEQ ID NO: 1680 - RNA, 19 nt, Artificial Sequence
  Description of Artificial Sequence: Synthetic oligonucleotide
uucucaaaggauaggccuu

SEQ ID NO: 1681 - RNA, 19 nt, Artificial Sequence
  Description of Artificial Sequence: Synthetic oligonucleotide
ucucaaaggauaggccuuu

SEQ ID NO: 1682 - RNA, 19 nt, Artificial Sequence
  Description of Artificial Sequence: Synthetic oligonucleotide
cucaaaggauaggccuuug

SEQ ID NO: 1683 - RNA, 19 nt, Artificial Sequence
  Description of Artificial Sequence: Synthetic oligonucleotide
ucaaaggauaggccuuuga

SEQ ID NO: 1684 - RNA, 19 nt, Artificial Sequence
  Description of Artificial Sequence: Synthetic oligonucleotide
caaaggauaggccuuugag

SEQ ID NO: 1685 - RNA, 19 nt, Artificial Sequence
  Description of Artificial Sequence: Synthetic oligonucleotide
aaaggauaggccuuugagu

SEQ ID NO: 1686 - RNA, 19 nt, Artificial Sequence
  Description of Artificial Sequence: Synthetic oligonucleotide
aaggauaggccuuugagug

SEQ ID NO: 1687 - RNA, 19 nt, Artificial Sequence
  Description of Artificial Sequence: Synthetic oligonucleotide
aggauaggccuuugagugu

SEQ ID NO: 1688 - RNA, 19 nt, Artificial Sequence
  Description of Artificial Sequence: Synthetic oligonucleotide
ggauaggccuuugaguguu

SEQ ID NO: 1689 - RNA, 19 nt, Artificial Sequence
  Description of Artificial Sequence: Synthetic oligonucleotide
gauaggccuuugaguguua

SEQ ID NO: 1690 - RNA, 19 nt, Artificial Sequence
  Description of Artificial Sequence: Synthetic oligonucleotide
auaggccuuugaguguuag

SEQ ID NO: 1691 - RNA, 19 nt, Artificial Sequence
  Description of Artificial Sequence: Synthetic oligonucleotide
uaggccuuugaguguuaga

SEQ ID NO: 1692 - RNA, 19 nt, Artificial Sequence
  Description of Artificial Sequence: Synthetic oligonucleotide
aggccuuugaguguuagag

SEQ ID NO: 1693 - RNA, 19 nt, Artificial Sequence
  Description of Artificial Sequence: Synthetic oligonucleotide
ggccuuugaguguuagaga

SEQ ID NO: 1694 - RNA, 19 nt, Artificial Sequence
  Description of Artificial Sequence: Synthetic oligonucleotide
gccuuugaguguuagagaa

SEQ ID NO: 1695 - RNA, 19 nt, Artificial Sequence
  Description of Artificial Sequence: Synthetic oligonucleotide
ccuuugaguguuagagaaa

SEQ ID NO: 1696 - RNA, 19 nt, Artificial Sequence
  Description of Artificial Sequence: Synthetic oligonucleotide
cuuugaguguuagagaaag

SEQ ID NO: 1697 - RNA, 19 nt, Artificial Sequence
  Description of Artificial Sequence: Synthetic oligonucleotide
uuugaguguuagagaaagg

SEQ ID NO: 1698 - RNA, 19 nt, Artificial Sequence
  Description of Artificial Sequence: Synthetic oligonucleotide
uugaguguuagagaaagga

SEQ ID NO: 1699 - RNA, 19 nt, Artificial Sequence
  Description of Artificial Sequence: Synthetic oligonucleotide
ugaguguuagagaaaggag

SEQ ID NO: 1700 - RNA, 19 nt, Artificial Sequence
  Description of Artificial Sequence: Synthetic oligonucleotide
gaguguuagagaaaggagu

SEQ ID NO: 1701 - RNA, 19 nt, Artificial Sequence
  Description of Artificial Sequence: Synthetic oligonucleotide
aguguuagagaaaggagug

SEQ ID NO: 1702 - RNA, 19 nt, Artificial Sequence
  Description of Artificial Sequence: Synthetic oligonucleotide
guguuagagaaaggaguga

SEQ ID NO: 1703 - RNA, 19 nt, Artificial Sequence
  Description of Artificial Sequence: Synthetic oligonucleotide
uguuagagaaaggagugaa

SEQ ID NO: 1704 - RNA, 19 nt, Artificial Sequence
  Description of Artificial Sequence: Synthetic oligonucleotide
guuagagaaaggagugaag

SEQ ID NO: 1705 - RNA, 19 nt, Artificial Sequence
  Description of Artificial Sequence: Synthetic oligonucleotide
uuagagaaaggagugaagg

SEQ ID NO: 1706 - RNA, 19 nt, Artificial Sequence
  Description of Artificial Sequence: Synthetic oligonucleotide
uagagaaaggagugaagga

SEQ ID NO: 1707 - RNA, 19 nt, Artificial Sequence
  Description of Artificial Sequence: Synthetic oligonucleotide
agagaaaggagugaaggag

SEQ ID NO: 1708 - RNA, 19 nt, Artificial Sequence
  Description of Artificial Sequence: Synthetic oligonucleotide
gagaaaggagugaaggagg

SEQ ID NO: 1709 - RNA, 19 nt, Artificial Sequence
  Description of Artificial Sequence: Synthetic oligonucleotide
agaaaggagugaaggaggc

SEQ ID NO: 1710 - RNA, 19 nt, Artificial Sequence
  Description of Artificial Sequence: Synthetic oligonucleotide
gaaaggagugaaggaggca

SEQ ID NO: 1711 - RNA, 19 nt, Artificial Sequence
  Description of Artificial Sequence: Synthetic oligonucleotide
aaaggagugaaggaggcag

SEQ ID NO: 1712 - RNA, 19 nt, Artificial Sequence
  Description of Artificial Sequence: Synthetic oligonucleotide
aaggagugaaggaggcagg

SEQ ID NO: 1713 - RNA, 19 nt, Artificial Sequence
  Description of Artificial Sequence: Synthetic oligonucleotide
aggagugaaggaggcaggu

SEQ ID NO: 1714 - RNA, 19 nt, Artificial Sequence
  Description of Artificial Sequence: Synthetic oligonucleotide
ggagugaaggaggcaggug

SEQ ID NO: 1715 - RNA, 19 nt, Artificial Sequence
  Description of Artificial Sequence: Synthetic oligonucleotide
gagugaaggaggcaggugg

SEQ ID NO: 1716 - RNA, 19 nt, Artificial Sequence
  Description of Artificial Sequence: Synthetic oligonucleotide
agugaaggaggcagguggg

SEQ ID NO: 1717 - RNA, 19 nt, Artificial Sequence
  Description of Artificial Sequence: Synthetic oligonucleotide
gugaaggaggcagguggga

SEQ ID NO: 1718 - RNA, 19 nt, Artificial Sequence
  Description of Artificial Sequence: Synthetic oligonucleotide
ugaaggaggcaggugggaa

SEQ ID NO: 1719 - RNA, 19 nt, Artificial Sequence
  Description of Artificial Sequence: Synthetic oligonucleotide
gaaggaggcaggugggaaa

SEQ ID NO: 1720 - RNA, 19 nt, Artificial Sequence
  Description of Artificial Sequence: Synthetic oligonucleotide
aaggaggcaggugggaaau

SEQ ID NO: 1721 - RNA, 19 nt, Artificial Sequence
  Description of Artificial Sequence: Synthetic oligonucleotide
aggaggcaggugggaaaug

SEQ ID NO: 1722 - RNA, 19 nt, Artificial Sequence
  Description of Artificial Sequence: Synthetic oligonucleotide
ggaggcaggugggaaaugg

SEQ ID NO: 1723 - RNA, 19 nt, Artificial Sequence
  Description of Artificial Sequence: Synthetic oligonucleotide
gaggcaggugggaaauggu

SEQ ID NO: 1724 - RNA, 19 nt, Artificial Sequence
  Description of Artificial Sequence: Synthetic oligonucleotide
aggcaggugggaaauggua

SEQ ID NO: 1725 - RNA, 19 nt, Artificial Sequence
  Description of Artificial Sequence: Synthetic oligonucleotide
ggcaggugggaaaugguau

SEQ ID NO: 1726 - RNA, 19 nt, Artificial Sequence
  Description of Artificial Sequence: Synthetic oligonucleotide
gcaggugggaaaugguauu

SEQ ID NO: 1727 - RNA, 19 nt, Artificial Sequence
  Description of Artificial Sequence: Synthetic oligonucleotide
caggugggaaaugguauuu

SEQ ID NO: 1728 - RNA, 19 nt, Artificial Sequence
  Description of Artificial Sequence: Synthetic oligonucleotide
aggugggaaaugguauuuc

SEQ ID NO: 1729 - RNA, 19 nt, Artificial Sequence
  Description of Artificial Sequence: Synthetic oligonucleotide
ggugggaaaugguauuucu

SEQ ID NO: 1730 - RNA, 19 nt, Artificial Sequence
  Description of Artificial Sequence: Synthetic oligonucleotide
gugggaaaugguauuucua

SEQ ID NO: 1731 - RNA, 19 nt, Artificial Sequence
  Description of Artificial Sequence: Synthetic oligonucleotide
ugggaaaugguauuucuau

SEQ ID NO: 1732 - RNA, 19 nt, Artificial Sequence
  Description of Artificial Sequence: Synthetic oligonucleotide
gggaaaugguauuucuauu

SEQ ID NO: 1733 - RNA, 19 nt, Artificial Sequence
  Description of Artificial Sequence: Synthetic oligonucleotide
ggaaaugguauuucuauuu

SEQ ID NO: 1734 - RNA, 19 nt, Artificial Sequence
  Description of Artificial Sequence: Synthetic oligonucleotide
gaaaugguauuucuauuuu

SEQ ID NO: 1735 - RNA, 19 nt, Artificial Sequence
  Description of Artificial Sequence: Synthetic oligonucleotide
aaaugguauuucuauuuuu

SEQ ID NO: 1736 - RNA, 19 nt, Artificial Sequence
  Description of Artificial Sequence: Synthetic oligonucleotide
aaugguauuucuauuuuua

SEQ ID NO: 1737 - RNA, 19 nt, Artificial Sequence
  Description of Artificial Sequence: Synthetic oligonucleotide
augguauuucuauuuuuaa

SEQ ID NO: 1738 - RNA, 19 nt, Artificial Sequence
  Description of Artificial Sequence: Synthetic oligonucleotide
ugguauuucuauuuuuaaa

SEQ ID NO: 1739 - RNA, 19 nt, Artificial Sequence
  Description of Artificial Sequence: Synthetic oligonucleotide
gguauuucuauuuuuaaau

SEQ ID NO: 1740 - RNA, 19 nt, Artificial Sequence
  Description of Artificial Sequence: Synthetic oligonucleotide
guauuucuauuuuuaaauc

SEQ ID NO: 1741 - RNA, 19 nt, Artificial Sequence
  Description of Artificial Sequence: Synthetic oligonucleotide
uauuucuauuuuuaaaucc

SEQ ID NO: 1742 - RNA, 19 nt, Artificial Sequence
  Description of Artificial Sequence: Synthetic oligonucleotide
auuucuauuuuuaaaucca

SEQ ID NO: 1743 - RNA, 19 nt, Artificial Sequence
  Description of Artificial Sequence: Synthetic oligonucleotide
uuucuauuuuuaaauccag

SEQ ID NO: 1744 - RNA, 19 nt, Artificial Sequence
  Description of Artificial Sequence: Synthetic oligonucleotide
uucuauuuuuaaauccagu

SEQ ID NO: 1745 - RNA, 19 nt, Artificial Sequence
  Description of Artificial Sequence: Synthetic oligonucleotide
ucuauuuuuaaauccagug

SEQ ID NO: 1746 - RNA, 19 nt, Artificial Sequence
  Description of Artificial Sequence: Synthetic oligonucleotide
cuauuuuuaaauccaguga

SEQ ID NO: 1747 - RNA, 19 nt, Artificial Sequence
  Description of Artificial Sequence: Synthetic oligonucleotide
uauuuuuaaauccagugaa

SEQ ID NO: 1748 - RNA, 19 nt, Artificial Sequence
  Description of Artificial Sequence: Synthetic oligonucleotide
auuuuuaaauccagugaaa

SEQ ID NO: 1749 - RNA, 19 nt, Artificial Sequence
  Description of Artificial Sequence: Synthetic oligonucleotide
uuuuuaaauccagugaaau

SEQ ID NO: 1750 - RNA, 19 nt, Artificial Sequence
  Description of Artificial Sequence: Synthetic oligonucleotide
uuuuaaauccagugaaauu

SEQ ID NO: 1751 - RNA, 19 nt, Artificial Sequence
  Description of Artificial Sequence: Synthetic oligonucleotide
uuuaaauccagugaaauua

SEQ ID NO: 1752 - RNA, 19 nt, Artificial Sequence
  Description of Artificial Sequence: Synthetic oligonucleotide
uuaaauccagugaaauuau

SEQ ID NO: 1753 - RNA, 19 nt, Artificial Sequence
  Description of Artificial Sequence: Synthetic oligonucleotide
uaaauccagugaaauuauc

SEQ ID NO: 1754 - RNA, 19 nt, Artificial Sequence
  Description of Artificial Sequence: Synthetic oligonucleotide
aaauccagugaaauuaucu

SEQ ID NO: 1755 - RNA, 19 nt, Artificial Sequence
  Description of Artificial Sequence: Synthetic oligonucleotide
aauccagugaaauuaucuu

SEQ ID NO: 1756 - RNA, 19 nt, Artificial Sequence
  Description of Artificial Sequence: Synthetic oligonucleotide
auccagugaaauuaucuug

SEQ ID NO: 1757 - RNA, 19 nt, Artificial Sequence
  Description of Artificial Sequence: Synthetic oligonucleotide
uccagugaaauuaucuuga

SEQ ID NO: 1758 - RNA, 19 nt, Artificial Sequence
  Description of Artificial Sequence: Synthetic oligonucleotide
ccagugaaauuaucuugag

SEQ ID NO: 1759 - RNA, 19 nt, Artificial Sequence
  Description of Artificial Sequence: Synthetic oligonucleotide
cagugaaauuaucuugagu

SEQ ID NO: 1760 - RNA, 19 nt, Artificial Sequence
  Description of Artificial Sequence: Synthetic oligonucleotide
agugaaauuaucuugaguc

SEQ ID NO: 1761 - RNA, 19 nt, Artificial Sequence
  Description of Artificial Sequence: Synthetic oligonucleotide
gugaaauuaucuugagucu

SEQ ID NO: 1762 - RNA, 19 nt, Artificial Sequence
  Description of Artificial Sequence: Synthetic oligonucleotide
ugaaauuaucuugagucua

SEQ ID NO: 1763 - RNA, 19 nt, Artificial Sequence
  Description of Artificial Sequence: Synthetic oligonucleotide
gaaauuaucuugagucuac

SEQ ID NO: 1764 - RNA, 19 nt, Artificial Sequence
  Description of Artificial Sequence: Synthetic oligonucleotide
aaauuaucuugagucuaca

SEQ ID NO: 1765 - RNA, 19 nt, Artificial Sequence
  Description of Artificial Sequence: Synthetic oligonucleotide
aauuaucuugagucuacac

SEQ ID NO: 1766 - RNA, 19 nt, Artificial Sequence
  Description of Artificial Sequence: Synthetic oligonucleotide
auuaucuugagucuacaca

SEQ ID NO: 1767 - RNA, 19 nt, Artificial Sequence
  Description of Artificial Sequence: Synthetic oligonucleotide
uuaucuugagucuacacau

SEQ ID NO: 1768 - RNA, 19 nt, Artificial Sequence
  Description of Artificial Sequence: Synthetic oligonucleotide
uaucuugagucuacacauu

SEQ ID NO: 1769 - RNA, 19 nt, Artificial Sequence
  Description of Artificial Sequence: Synthetic oligonucleotide
aucuugagucuacacauua

SEQ ID NO: 1770 - RNA, 19 nt, Artificial Sequence
  Description of Artificial Sequence: Synthetic oligonucleotide
ucuugagucuacacauuau

SEQ ID NO: 1771 - RNA, 19 nt, Artificial Sequence
  Description of Artificial Sequence: Synthetic oligonucleotide
cuugagucuacacauuauu

SEQ ID NO: 1772 - RNA, 19 nt, Artificial Sequence
  Description of Artificial Sequence: Synthetic oligonucleotide
uugagucuacacauuauuu

SEQ ID NO: 1773 - RNA, 19 nt, Artificial Sequence
  Description of Artificial Sequence: Synthetic oligonucleotide
ugagucuacacauuauuuu

SEQ ID NO: 1774 - RNA, 19 nt, Artificial Sequence
  Description of Artificial Sequence: Synthetic oligonucleotide
gagucuacacauuauuuuu

SEQ ID NO: 1775 - RNA, 19 nt, Artificial Sequence
  Description of Artificial Sequence: Synthetic oligonucleotide
agucuacacauuauuuuua

SEQ ID NO: 1776 - RNA, 19 nt, Artificial Sequence
  Description of Artificial Sequence: Synthetic oligonucleotide
gucuacacauuauuuuuaa

SEQ ID NO: 1777 - RNA, 19 nt, Artificial Sequence
  Description of Artificial Sequence: Synthetic oligonucleotide
ucuacacauuauuuuuaaa

SEQ ID NO: 1778 - RNA, 19 nt, Artificial Sequence
  Description of Artificial Sequence: Synthetic oligonucleotide
cuacacauuauuuuuaaaa

SEQ ID NO: 1779 - RNA, 19 nt, Artificial Sequence
  Description of Artificial Sequence: Synthetic oligonucleotide
uacacauuauuuuuaaaac

SEQ ID NO: 1780 - RNA, 19 nt, Artificial Sequence
  Description of Artificial Sequence: Synthetic oligonucleotide
acacauuauuuuuaaaaca

SEQ ID NO: 1781 - RNA, 19 nt, Artificial Sequence
  Description of Artificial Sequence: Synthetic oligonucleotide
cacauuauuuuuaaaacac

SEQ ID NO: 1782 - RNA, 19 nt, Artificial Sequence
  Description of Artificial Sequence: Synthetic oligonucleotide
acauuauuuuuaaaacaca

SEQ ID NO: 1783 - RNA, 19 nt, Artificial Sequence
  Description of Artificial Sequence: Synthetic oligonucleotide
cauuauuuuuaaaacacaa

SEQ ID NO: 1784 - RNA, 19 nt, Artificial Sequence
  Description of Artificial Sequence: Synthetic oligonucleotide
auuauuuuuaaaacacaaa

SEQ ID NO: 1785 - RNA, 19 nt, Artificial Sequence
  Description of Artificial Sequence: Synthetic oligonucleotide
uuauuuuuaaaacacaaaa

SEQ ID NO: 1786 - RNA, 19 nt, Artificial Sequence
  Description of Artificial Sequence: Synthetic oligonucleotide
uauuuuuaaaacacaaaaa

SEQ ID NO: 1787 - RNA, 19 nt, Artificial Sequence
  Description of Artificial Sequence: Synthetic oligonucleotide
auuuuuaaaacacaaaaau

SEQ ID NO: 1788 - RNA, 19 nt, Artificial Sequence
  Description of Artificial Sequence: Synthetic oligonucleotide
uuuuuaaaacacaaaaauu

SEQ ID NO: 1789 - RNA, 19 nt, Artificial Sequence
  Description of Artificial Sequence: Synthetic oligonucleotide
uuuuaaaacacaaaaauug

SEQ ID NO: 1790 - RNA, 19 nt, Artificial Sequence
  Description of Artificial Sequence: Synthetic oligonucleotide
uuuaaaacacaaaaauugu

SEQ ID NO: 1791 - RNA, 19 nt, Artificial Sequence
  Description of Artificial Sequence: Synthetic oligonucleotide
uuaaaacacaaaaauuguu

SEQ ID NO: 1792 - RNA, 19 nt, Artificial Sequence
  Description of Artificial Sequence: Synthetic oligonucleotide
uaaaacacaaaaauuguuc

SEQ ID NO: 1793 - RNA, 19 nt, Artificial Sequence
  Description of Artificial Sequence: Synthetic oligonucleotide
aaaacacaaaaauuguucg

SEQ ID NO: 1794 - RNA, 19 nt, Artificial Sequence
  Description of Artificial Sequence: Synthetic oligonucleotide
aaacacaaaaauuguucgg

SEQ ID NO: 1795 - RNA, 19 nt, Artificial Sequence
  Description of Artificial Sequence: Synthetic oligonucleotide
aacacaaaaauuguucggc

SEQ ID NO: 1796 - RNA, 19 nt, Artificial Sequence
  Description of Artificial Sequence: Synthetic oligonucleotide
acacaaaaauuguucggcu

SEQ ID NO: 1797 - RNA, 19 nt, Artificial Sequence
  Description of Artificial Sequence: Synthetic oligonucleotide
cacaaaaauuguucggcug

SEQ ID NO: 1798 - RNA, 19 nt, Artificial Sequence
  Description of Artificial Sequence: Synthetic oligonucleotide
acaaaaauuguucggcugg

SEQ ID NO: 1799 - RNA, 19 nt, Artificial Sequence
  Description of Artificial Sequence: Synthetic oligonucleotide
caaaaauuguucggcugga

SEQ ID NO: 1800 - RNA, 19 nt, Artificial Sequence
  Description of Artificial Sequence: Synthetic oligonucleotide
aaaaauuguucggcuggaa

SEQ ID NO: 1801 - RNA, 19 nt, Artificial Sequence
  Description of Artificial Sequence: Synthetic oligonucleotide
aaaauuguucggcuggaac

SEQ ID NO: 1802 - RNA, 19 nt, Artificial Sequence
  Description of Artificial Sequence: Synthetic oligonucleotide
aaauuguucggcuggaacu

SEQ ID NO: 1803 - RNA, 19 nt, Artificial Sequence
  Description of Artificial Sequence: Synthetic oligonucleotide
aauuguucggcuggaacug

SEQ ID NO: 1804 - RNA, 19 nt, Artificial Sequence
  Description of Artificial Sequence: Synthetic oligonucleotide
auuguucggcuggaacuga

SEQ ID NO: 1805 - RNA, 19 nt, Artificial Sequence
  Description of Artificial Sequence: Synthetic oligonucleotide
uuguucggcuggaacugac

SEQ ID NO: 1806 - RNA, 19 nt, Artificial Sequence
  Description of Artificial Sequence: Synthetic oligonucleotide
uguucggcuggaacugacc

SEQ ID NO: 1807 - RNA, 19 nt, Artificial Sequence
  Description of Artificial Sequence: Synthetic oligonucleotide
guucggcuggaacugaccc

SEQ ID NO: 1808 - RNA, 19 nt, Artificial Sequence
  Description of Artificial Sequence: Synthetic oligonucleotide
uucggcuggaacugaccca

SEQ ID NO: 1809 - RNA, 19 nt, Artificial Sequence
  Description of Artificial Sequence: Synthetic oligonucleotide
ucggcuggaacugacccag

SEQ ID NO: 1810 - RNA, 19 nt, Artificial Sequence
  Description of Artificial Sequence: Synthetic oligonucleotide
cggcuggaacugacccagg

SEQ ID NO: 1811 - RNA, 19 nt, Artificial Sequence
  Description of Artificial Sequence: Synthetic oligonucleotide
ggcuggaacugacccaggc

SEQ ID NO: 1812 - RNA, 19 nt, Artificial Sequence
  Description of Artificial Sequence: Synthetic oligonucleotide
gcuggaacugacccaggcu

SEQ ID NO: 1813 - RNA, 19 nt, Artificial Sequence
  Description of Artificial Sequence: Synthetic oligonucleotide
cuggaacugacccaggcug

SEQ ID NO: 1814 - RNA, 19 nt, Artificial Sequence
  Description of Artificial Sequence: Synthetic oligonucleotide
uggaacugacccaggcugg

SEQ ID NO: 1815 - RNA, 19 nt, Artificial Sequence
  Description of Artificial Sequence: Synthetic oligonucleotide
ggaacugacccaggcugga

SEQ ID NO: 1816 - RNA, 19 nt, Artificial Sequence
  Description of Artificial Sequence: Synthetic oligonucleotide
gaacugacccaggcuggac

SEQ ID NO: 1817 - RNA, 19 nt, Artificial Sequence
  Description of Artificial Sequence: Synthetic oligonucleotide
aacugacccaggcuggacu

SEQ ID NO: 1818 - RNA, 19 nt, Artificial Sequence
  Description of Artificial Sequence: Synthetic oligonucleotide
acugacccaggcuggacuu

SEQ ID NO: 1819 - RNA, 19 nt, Artificial Sequence
  Description of Artificial Sequence: Synthetic oligonucleotide
cugacccaggcuggacuug

SEQ ID NO: 1820 - RNA, 19 nt, Artificial Sequence
  Description of Artificial Sequence: Synthetic oligonucleotide
ugacccaggcuggacuugc

SEQ ID NO: 1821 - RNA, 19 nt, Artificial Sequence
  Description of Artificial Sequence: Synthetic oligonucleotide
gacccaggcuggacuugcg

SEQ ID NO: 1822 - RNA, 19 nt, Artificial Sequence
  Description of Artificial Sequence: Synthetic oligonucleotide
acccaggcuggacuugcgg

SEQ ID NO: 1823 - RNA, 19 nt, Artificial Sequence
  Description of Artificial Sequence: Synthetic oligonucleotide
cccaggcuggacuugcggg

SEQ ID NO: 1824 - RNA, 19 nt, Artificial Sequence
  Description of Artificial Sequence: Synthetic oligonucleotide
ccaggcuggacuugcgggg

SEQ ID NO: 1825 - RNA, 19 nt, Artificial Sequence
  Description of Artificial Sequence: Synthetic oligonucleotide
caggcuggacuugcgggga

SEQ ID NO: 1826 - RNA, 19 nt, Artificial Sequence
  Description of Artificial Sequence: Synthetic oligonucleotide
aggcuggacuugcggggag

SEQ ID NO: 1827 - RNA, 19 nt, Artificial Sequence
  Description of Artificial Sequence: Synthetic oligonucleotide
ggcuggacuugcggggagg

SEQ ID NO: 1828 - RNA, 19 nt, Artificial Sequence
  Description of Artificial Sequence: Synthetic oligonucleotide
gcuggacuugcggggagga

SEQ ID NO: 1829 - RNA, 19 nt, Artificial Sequence
  Description of Artificial Sequence: Synthetic oligonucleotide
cuggacuugcggggaggaa

SEQ ID NO: 1830 - RNA, 19 nt, Artificial Sequence
  Description of Artificial Sequence: Synthetic oligonucleotide
uggacuugcggggaggaaa

SEQ ID NO: 1831 - RNA, 19 nt, Artificial Sequence
  Description of Artificial Sequence: Synthetic oligonucleotide
ggacuugcggggaggaaac

SEQ ID NO: 1832 - RNA, 19 nt, Artificial Sequence
  Description of Artificial Sequence: Synthetic oligonucleotide
gacuugcggggaggaaacu

SEQ ID NO: 1833 - RNA, 19 nt, Artificial Sequence
  Description of Artificial Sequence: Synthetic oligonucleotide
acuugcggggaggaaacuc

SEQ ID NO: 1834 - RNA, 19 nt, Artificial Sequence
  Description of Artificial Sequence: Synthetic oligonucleotide
cuugcggggaggaaacucc

SEQ ID NO: 1835 - RNA, 19 nt, Artificial Sequence
  Description of Artificial Sequence: Synthetic oligonucleotide
uugcggggaggaaacucca

SEQ ID NO: 1836 - RNA, 19 nt, Artificial Sequence
  Description of Artificial Sequence: Synthetic oligonucleotide
ugcggggaggaaacuccag

SEQ ID NO: 1837 - RNA, 19 nt, Artificial Sequence
  Description of Artificial Sequence: Synthetic oligonucleotide
gcggggaggaaacuccagg

SEQ ID NO: 1838 - RNA, 19 nt, Artificial Sequence
  Description of Artificial Sequence: Synthetic oligonucleotide
cggggaggaaacuccaggg

SEQ ID NO: 1839 - RNA, 19 nt, Artificial Sequence
  Description of Artificial Sequence: Synthetic oligonucleotide
ggggaggaaacuccagggc

SEQ ID NO: 1840 - RNA, 19 nt, Artificial Sequence
  Description of Artificial Sequence: Synthetic oligonucleotide
gggaggaaacuccagggca

SEQ ID NO: 1841 - RNA, 19 nt, Artificial Sequence
  Description of Artificial Sequence: Synthetic oligonucleotide
ggaggaaacuccagggcac

SEQ ID NO: 1842 - RNA, 19 nt, Artificial Sequence
  Description of Artificial Sequence: Synthetic oligonucleotide
gaggaaacuccagggcacu

SEQ ID NO: 1843 - RNA, 19 nt, Artificial Sequence
  Description of Artificial Sequence: Synthetic oligonucleotide
aggaaacuccagggcacug

SEQ ID NO: 1844 - RNA, 19 nt, Artificial Sequence
  Description of Artificial Sequence: Synthetic oligonucleotide
ggaaacuccagggcacugc

SEQ ID NO: 1845 - RNA, 19 nt, Artificial Sequence
  Description of Artificial Sequence: Synthetic oligonucleotide
gaaacuccagggcacugca

SEQ ID NO: 1846 - RNA, 19 nt, Artificial Sequence
  Description of Artificial Sequence: Synthetic oligonucleotide
aaacuccagggcacugcau

SEQ ID NO: 1847 - RNA, 19 nt, Artificial Sequence
  Description of Artificial Sequence: Synthetic oligonucleotide
aacuccagggcacugcauc

SEQ ID NO: 1848 - RNA, 19 nt, Artificial Sequence
  Description of Artificial Sequence: Synthetic oligonucleotide
acuccagggcacugcaucu

SEQ ID NO: 1849 - RNA, 19 nt, Artificial Sequence
  Description of Artificial Sequence: Synthetic oligonucleotide
cuccagggcacugcaucug

SEQ ID NO: 1850 - RNA, 19 nt, Artificial Sequence
  Description of Artificial Sequence: Synthetic oligonucleotide
uccagggcacugcaucugg

SEQ ID NO: 1851 - RNA, 19 nt, Artificial Sequence
  Description of Artificial Sequence: Synthetic oligonucleotide
ccagggcacugcaucuggc

SEQ ID NO: 1852 - RNA, 19 nt, Artificial Sequence
  Description of Artificial Sequence: Synthetic oligonucleotide
cagggcacugcaucuggcg

SEQ ID NO: 1853 - RNA, 19 nt, Artificial Sequence
  Description of Artificial Sequence: Synthetic oligonucleotide
agggcacugcaucuggcga

SEQ ID NO: 1854 - RNA, 19 nt, Artificial Sequence
  Description of Artificial Sequence: Synthetic oligonucleotide
gggcacugcaucuggcgau

SEQ ID NO: 1855 - RNA, 19 nt, Artificial Sequence
  Description of Artificial Sequence: Synthetic oligonucleotide
ggcacugcaucuggcgauc

SEQ ID NO: 1856 - RNA, 19 nt, Artificial Sequence
  Description of Artificial Sequence: Synthetic oligonucleotide
gcacugcaucuggcgauca

SEQ ID NO: 1857 - RNA, 19 nt, Artificial Sequence
  Description of Artificial Sequence: Synthetic oligonucleotide
cacugcaucuggcgaucag

SEQ ID NO: 1858 - RNA, 19 nt, Artificial Sequence
  Description of Artificial Sequence: Synthetic oligonucleotide
acugcaucuggcgaucaga

SEQ ID NO: 1859 - RNA, 19 nt, Artificial Sequence
  Description of Artificial Sequence: Synthetic oligonucleotide
cugcaucuggcgaucagac

SEQ ID NO: 1860 - RNA, 19 nt, Artificial Sequence
  Description of Artificial Sequence: Synthetic oligonucleotide
ugcaucuggcgaucagacu

SEQ ID NO: 1861 - RNA, 19 nt, Artificial Sequence
  Description of Artificial Sequence: Synthetic oligonucleotide
gcaucuggcgaucagacuc

SEQ ID NO: 1862 - RNA, 19 nt, Artificial Sequence
  Description of Artificial Sequence: Synthetic oligonucleotide
caucuggcgaucagacucu

SEQ ID NO: 1863 - RNA, 19 nt, Artificial Sequence
  Description of Artificial Sequence: Synthetic oligonucleotide
aucuggcgaucagacucug

SEQ ID NO: 1864 - RNA, 19 nt, Artificial Sequence
  Description of Artificial Sequence: Synthetic oligonucleotide
ucuggcgaucagacucuga

SEQ ID NO: 1865 - RNA, 19 nt, Artificial Sequence
  Description of Artificial Sequence: Synthetic oligonucleotide
cuggcgaucagacucugag

SEQ ID NO: 1866 - RNA, 19 nt, Artificial Sequence
  Description of Artificial Sequence: Synthetic oligonucleotide
uggcgaucagacucugagc

SEQ ID NO: 1867 - RNA, 19 nt, Artificial Sequence
  Description of Artificial Sequence: Synthetic oligonucleotide
ggcgaucagacucugagca

SEQ ID NO: 1868 - RNA, 19 nt, Artificial Sequence
  Description of Artificial Sequence: Synthetic oligonucleotide
gcgaucagacucugagcac

SEQ ID NO: 1869 - RNA, 19 nt, Artificial Sequence
  Description of Artificial Sequence: Synthetic oligonucleotide
cgaucagacucugagcacu

SEQ ID NO: 1870 - RNA, 19 nt, Artificial Sequence
  Description of Artificial Sequence: Synthetic oligonucleotide
gaucagacucugagcacug

SEQ ID NO: 1871 - RNA, 19 nt, Artificial Sequence
  Description of Artificial Sequence: Synthetic oligonucleotide
aucagacucugagcacugc

SEQ ID NO: 1872 - RNA, 19 nt, Artificial Sequence
  Description of Artificial Sequence: Synthetic oligonucleotide
ucagacucugagcacugcc

SEQ ID NO: 1873 - RNA, 19 nt, Artificial Sequence
  Description of Artificial Sequence: Synthetic oligonucleotide
cagacucugagcacugccc

SEQ ID NO: 1874 - RNA, 19 nt, Artificial Sequence
  Description of Artificial Sequence: Synthetic oligonucleotide
agacucugagcacugcccc

SEQ ID NO: 1875 - RNA, 19 nt, Artificial Sequence
  Description of Artificial Sequence: Synthetic oligonucleotide
gacucugagcacugccccu

SEQ ID NO: 1876 - RNA, 19 nt, Artificial Sequence
  Description of Artificial Sequence: Synthetic oligonucleotide
acucugagcacugccccug

SEQ ID NO: 1877 - RNA, 19 nt, Artificial Sequence
  Description of Artificial Sequence: Synthetic oligonucleotide
cucugagcacugccccugc

SEQ ID NO: 1878 - RNA, 19 nt, Artificial Sequence
  Description of Artificial Sequence: Synthetic oligonucleotide
ucugagcacugccccugcu

SEQ ID NO: 1879 - RNA, 19 nt, Artificial Sequence
  Description of Artificial Sequence: Synthetic oligonucleotide
cugagcacugccccugcuc

SEQ ID NO: 1880 - RNA, 19 nt, Artificial Sequence
  Description of Artificial Sequence: Synthetic oligonucleotide
ugagcacugccccugcucg

SEQ ID NO: 1881 - RNA, 19 nt, Artificial Sequence
  Description of Artificial Sequence: Synthetic oligonucleotide
gagcacugccccugcucgc

SEQ ID NO: 1882 - RNA, 19 nt, Artificial Sequence
  Description of Artificial Sequence: Synthetic oligonucleotide
agcacugccccugcucgcc

SEQ ID NO: 1883 - RNA, 19 nt, Artificial Sequence
  Description of Artificial Sequence: Synthetic oligonucleotide
gcacugccccugcucgccu

SEQ ID NO: 1884 - RNA, 19 nt, Artificial Sequence
  Description of Artificial Sequence: Synthetic oligonucleotide
cacugccccugcucgccuu

SEQ ID NO: 1885 - RNA, 19 nt, Artificial Sequence
  Description of Artificial Sequence: Synthetic oligonucleotide
acugccccugcucgccuug

SEQ ID NO: 1886 - RNA, 19 nt, Artificial Sequence
  Description of Artificial Sequence: Synthetic oligonucleotide
cugccccugcucgccuugg

SEQ ID NO: 1887 - RNA, 19 nt, Artificial Sequence
  Description of Artificial Sequence: Synthetic oligonucleotide
ugccccugcucgccuuggu

SEQ ID NO: 1888 - RNA, 19 nt, Artificial Sequence
  Description of Artificial Sequence: Synthetic oligonucleotide
gccccugcucgccuugguc

SEQ ID NO: 1889 - RNA, 19 nt, Artificial Sequence
  Description of Artificial Sequence: Synthetic oligonucleotide
ccccugcucgccuugguca

SEQ ID NO: 1890 - RNA, 19 nt, Artificial Sequence
  Description of Artificial Sequence: Synthetic oligonucleotide
cccugcucgccuuggucau

SEQ ID NO: 1891 - RNA, 19 nt, Artificial Sequence
  Description of Artificial Sequence: Synthetic oligonucleotide
ccugcucgccuuggucaug

SEQ ID NO: 1892 - RNA, 19 nt, Artificial Sequence
  Description of Artificial Sequence: Synthetic oligonucleotide
cugcucgccuuggucaugu

SEQ ID NO: 1893 - RNA, 19 nt, Artificial Sequence
  Description of Artificial Sequence: Synthetic oligonucleotide
ugcucgccuuggucaugua

SEQ ID NO: 1894 - RNA, 19 nt, Artificial Sequence
  Description of Artificial Sequence: Synthetic oligonucleotide
gcucgccuuggucauguac

SEQ ID NO: 1895 - RNA, 19 nt, Artificial Sequence
  Description of Artificial Sequence: Synthetic oligonucleotide
cucgccuuggucauguaca

SEQ ID NO: 1896 - RNA, 19 nt, Artificial Sequence
  Description of Artificial Sequence: Synthetic oligonucleotide
ucgccuuggucauguacag

SEQ ID NO: 1897 - RNA, 19 nt, Artificial Sequence
  Description of Artificial Sequence: Synthetic oligonucleotide
cgccuuggucauguacagc

SEQ ID NO: 1898 - RNA, 19 nt, Artificial Sequence
  Description of Artificial Sequence: Synthetic oligonucleotide
gccuuggucauguacagca

SEQ ID NO: 1899 - RNA, 19 nt, Artificial Sequence
  Description of Artificial Sequence: Synthetic oligonucleotide
ccuuggucauguacagcac

SEQ ID NO: 1900 - RNA, 19 nt, Artificial Sequence
  Description of Artificial Sequence: Synthetic oligonucleotide
cuuggucauguacagcacu

SEQ ID NO: 1901 - RNA, 19 nt, Artificial Sequence
  Description of Artificial Sequence: Synthetic oligonucleotide
uuggucauguacagcacug

SEQ ID NO: 1902 - RNA, 19 nt, Artificial Sequence
  Description of Artificial Sequence: Synthetic oligonucleotide
uggucauguacagcacuga

SEQ ID NO: 1903 - RNA, 19 nt, Artificial Sequence
  Description of Artificial Sequence: Synthetic oligonucleotide
ggucauguacagcacugaa

SEQ ID NO: 1904 - RNA, 19 nt, Artificial Sequence
  Description of Artificial Sequence: Synthetic oligonucleotide
gucauguacagcacugaaa

SEQ ID NO: 1905 - RNA, 19 nt, Artificial Sequence
  Description of Artificial Sequence: Synthetic oligonucleotide
ucauguacagcacugaaag

SEQ ID NO: 1906 - RNA, 19 nt, Artificial Sequence
  Description of Artificial Sequence: Synthetic oligonucleotide
cauguacagcacugaaagg

SEQ ID NO: 1907 - RNA, 19 nt, Artificial Sequence
  Description of Artificial Sequence: Synthetic oligonucleotide
auguacagcacugaaagga

SEQ ID NO: 1908 - RNA, 19 nt, Artificial Sequence
  Description of Artificial Sequence: Synthetic oligonucleotide
uguacagcacugaaaggaa

SEQ ID NO: 1909 - RNA, 19 nt, Artificial Sequence
  Description of Artificial Sequence: Synthetic oligonucleotide
guacagcacugaaaggaau

SEQ ID NO: 1910 - RNA, 19 nt, Artificial Sequence
  Description of Artificial Sequence: Synthetic oligonucleotide
uacagcacugaaaggaaug

SEQ ID NO: 1911 - RNA, 19 nt, Artificial Sequence
  Description of Artificial Sequence: Synthetic oligonucleotide
acagcacugaaaggaauga

SEQ ID NO: 1912 - RNA, 19 nt, Artificial Sequence
  Description of Artificial Sequence: Synthetic oligonucleotide
cagcacugaaaggaaugaa

SEQ ID NO: 1913 - RNA, 19 nt, Artificial Sequence
  Description of Artificial Sequence: Synthetic oligonucleotide
agcacugaaaggaaugaag

SEQ ID NO: 1914 - RNA, 19 nt, Artificial Sequence
  Description of Artificial Sequence: Synthetic oligonucleotide
gcacugaaaggaaugaagc

SEQ ID NO: 1915 - RNA, 19 nt, Artificial Sequence
  Description of Artificial Sequence: Synthetic oligonucleotide
cacugaaaggaaugaagca

SEQ ID NO: 1916 - RNA, 19 nt, Artificial Sequence
  Description of Artificial Sequence: Synthetic oligonucleotide
acugaaaggaaugaagcac

SEQ ID NO: 1917 - RNA, 19 nt, Artificial Sequence
  Description of Artificial Sequence: Synthetic oligonucleotide
cugaaaggaaugaagcacc

SEQ ID NO: 1918 - RNA, 19 nt, Artificial Sequence
  Description of Artificial Sequence: Synthetic oligonucleotide
ugaaaggaaugaagcacca

SEQ ID NO: 1919 - RNA, 19 nt, Artificial Sequence
  Description of Artificial Sequence: Synthetic oligonucleotide
gaaaggaaugaagcaccag

SEQ ID NO: 1920 - RNA, 19 nt, Artificial Sequence
  Description of Artificial Sequence: Synthetic oligonucleotide
aaaggaaugaagcaccagc

SEQ ID NO: 1921 - RNA, 19 nt, Artificial Sequence
  Description of Artificial Sequence: Synthetic oligonucleotide
aaggaaugaagcaccagca

SEQ ID NO: 1922 - RNA, 19 nt, Artificial Sequence
  Description of Artificial Sequence: Synthetic oligonucleotide
aggaaugaagcaccagcag

SEQ ID NO: 1923 - RNA, 19 nt, Artificial Sequence
  Description of Artificial Sequence: Synthetic oligonucleotide
ggaaugaagcaccagcagg

SEQ ID NO: 1924 - RNA, 19 nt, Artificial Sequence
  Description of Artificial Sequence: Synthetic oligonucleotide
gaaugaagcaccagcagga

SEQ ID NO: 1925 - RNA, 19 nt, Artificial Sequence
  Description of Artificial Sequence: Synthetic oligonucleotide
aaugaagcaccagcaggag

SEQ ID NO: 1926 - RNA, 19 nt, Artificial Sequence
  Description of Artificial Sequence: Synthetic oligonucleotide
augaagcaccagcaggagg

SEQ ID NO: 1927 - RNA, 19 nt, Artificial Sequence
  Description of Artificial Sequence: Synthetic oligonucleotide
ugaagcaccagcaggaggu

SEQ ID NO: 1928 - RNA, 19 nt, Artificial Sequence
  Description of Artificial Sequence: Synthetic oligonucleotide
gaagcaccagcaggaggug

SEQ ID NO: 1929 - RNA, 19 nt, Artificial Sequence
  Description of Artificial Sequence: Synthetic oligonucleotide
aagcaccagcaggaggugg

SEQ ID NO: 1930 - RNA, 19 nt, Artificial Sequence
  Description of Artificial Sequence: Synthetic oligonucleotide
agcaccagcaggaggugga

SEQ ID NO: 1931 - RNA, 19 nt, Artificial Sequence
  Description of Artificial Sequence: Synthetic oligonucleotide
gcaccagcaggagguggac

SEQ ID NO: 1932 - RNA, 19 nt, Artificial Sequence
  Description of Artificial Sequence: Synthetic oligonucleotide
caccagcaggagguggaca

SEQ ID NO: 1933 - RNA, 19 nt, Artificial Sequence
  Description of Artificial Sequence: Synthetic oligonucleotide
accagcaggagguggacag

SEQ ID NO: 1934 - RNA, 19 nt, Artificial Sequence
  Description of Artificial Sequence: Synthetic oligonucleotide
ccagcaggagguggacaga

SEQ ID NO: 1935 - RNA, 19 nt, Artificial Sequence
  Description of Artificial Sequence: Synthetic oligonucleotide
cagcaggagguggacagag

SEQ ID NO: 1936 - RNA, 19 nt, Artificial Sequence
  Description of Artificial Sequence: Synthetic oligonucleotide
agcaggagguggacagagu

SEQ ID NO: 1937 - RNA, 19 nt, Artificial Sequence
  Description of Artificial Sequence: Synthetic oligonucleotide
gcaggagguggacagaguc

SEQ ID NO: 1938 - RNA, 19 nt, Artificial Sequence
  Description of Artificial Sequence: Synthetic oligonucleotide
caggagguggacagagucu

SEQ ID NO: 1939 - RNA, 19 nt, Artificial Sequence
  Description of Artificial Sequence: Synthetic oligonucleotide
aggagguggacagagucuc

SEQ ID NO: 1940 - RNA, 19 nt, Artificial Sequence
  Description of Artificial Sequence: Synthetic oligonucleotide
ggagguggacagagucucu

SEQ ID NO: 1941 - RNA, 19 nt, Artificial Sequence
  Description of Artificial Sequence: Synthetic oligonucleotide
gagguggacagagucucuc

SEQ ID NO: 1942 - RNA, 19 nt, Artificial Sequence
  Description of Artificial Sequence: Synthetic oligonucleotide
agguggacagagucucuca

SEQ ID NO: 1943 - RNA, 19 nt, Artificial Sequence
  Description of Artificial Sequence: Synthetic oligonucleotide
gguggacagagucucucau

SEQ ID NO: 1944 - RNA, 19 nt, Artificial Sequence
  Description of Artificial Sequence: Synthetic oligonucleotide
guggacagagucucucaug

SEQ ID NO: 1945 - RNA, 19 nt, Artificial Sequence
  Description of Artificial Sequence: Synthetic oligonucleotide
uggacagagucucucaugg

SEQ ID NO: 1946 - RNA, 19 nt, Artificial Sequence
  Description of Artificial Sequence: Synthetic oligonucleotide
ggacagagucucucaugga

SEQ ID NO: 1947 - RNA, 19 nt, Artificial Sequence
  Description of Artificial Sequence: Synthetic oligonucleotide
gacagagucucucauggau

SEQ ID NO: 1948 - RNA, 19 nt, Artificial Sequence
  Description of Artificial Sequence: Synthetic oligonucleotide
acagagucucucauggaug

SEQ ID NO: 1949 - RNA, 19 nt, Artificial Sequence
  Description of Artificial Sequence: Synthetic oligonucleotide
cagagucucucauggaugc

SEQ ID NO: 1950 - RNA, 19 nt, Artificial Sequence
  Description of Artificial Sequence: Synthetic oligonucleotide
agagucucucauggaugcc

SEQ ID NO: 1951 - RNA, 19 nt, Artificial Sequence
  Description of Artificial Sequence: Synthetic oligonucleotide
gagucucucauggaugccg

SEQ ID NO: 1952 - RNA, 19 nt, Artificial Sequence
  Description of Artificial Sequence: Synthetic oligonucleotide
agucucucauggaugccgg

SEQ ID NO: 1953 - RNA, 19 nt, Artificial Sequence
  Description of Artificial Sequence: Synthetic oligonucleotide
gucucucauggaugccggc

SEQ ID NO: 1954 - RNA, 19 nt, Artificial Sequence
  Description of Artificial Sequence: Synthetic oligonucleotide
ucucucauggaugccggca

SEQ ID NO: 1955 - RNA, 19 nt, Artificial Sequence
  Description of Artificial Sequence: Synthetic oligonucleotide
cucucauggaugccggcac

SEQ ID NO: 1956 - RNA, 19 nt, Artificial Sequence
  Description of Artificial Sequence: Synthetic oligonucleotide
ucucauggaugccggcaca

SEQ ID NO: 1957 - RNA, 19 nt, Artificial Sequence
  Description of Artificial Sequence: Synthetic oligonucleotide
cucauggaugccggcacaa

SEQ ID NO: 1958 - RNA, 19 nt, Artificial Sequence
  Description of Artificial Sequence: Synthetic oligonucleotide
ucauggaugccggcacaaa

SEQ ID NO: 1959 - RNA, 19 nt, Artificial Sequence
  Description of Artificial Sequence: Synthetic oligonucleotide
cauggaugccggcacaaaa

SEQ ID NO: 1960 - RNA, 19 nt, Artificial Sequence
  Description of Artificial Sequence: Synthetic oligonucleotide
auggaugccggcacaaaac

SEQ ID NO: 1961 - RNA, 19 nt, Artificial Sequence
  Description of Artificial Sequence: Synthetic oligonucleotide
uggaugccggcacaaaacu

SEQ ID NO: 1962 - RNA, 19 nt, Artificial Sequence
  Description of Artificial Sequence: Synthetic oligonucleotide
ggaugccggcacaaaacug

SEQ ID NO: 1963 - RNA, 19 nt, Artificial Sequence
  Description of Artificial Sequence: Synthetic oligonucleotide
gaugccggcacaaaacugc

SEQ ID NO: 1964 - RNA, 19 nt, Artificial Sequence
  Description of Artificial Sequence: Synthetic oligonucleotide
augccggcacaaaacugcc

SEQ ID NO: 1965 - RNA, 19 nt, Artificial Sequence
  Description of Artificial Sequence: Synthetic oligonucleotide
ugccggcacaaaacugccu

SEQ ID NO: 1966 - RNA, 19 nt, Artificial Sequence
  Description of Artificial Sequence: Synthetic oligonucleotide
gccggcacaaaacugccuu

SEQ ID NO: 1967 - RNA, 19 nt, Artificial Sequence
  Description of Artificial Sequence: Synthetic oligonucleotide
ccggcacaaaacugccuua

SEQ ID NO: 1968 - RNA, 19 nt, Artificial Sequence
  Description of Artificial Sequence: Synthetic oligonucleotide
cggcacaaaacugccuuaa

SEQ ID NO: 1969 - RNA, 19 nt, Artificial Sequence
  Description of Artificial Sequence: Synthetic oligonucleotide
ggcacaaaacugccuuaaa

SEQ ID NO: 1970 - RNA, 19 nt, Artificial Sequence
  Description of Artificial Sequence: Synthetic oligonucleotide
gcacaaaacugccuuaaaa

SEQ ID NO: 1971 - RNA, 19 nt, Artificial Sequence
  Description of Artificial Sequence: Synthetic oligonucleotide
cacaaaacugccuuaaaau

SEQ ID NO: 1972 - RNA, 19 nt, Artificial Sequence
  Description of Artificial Sequence: Synthetic oligonucleotide
acaaaacugccuuaaaaua

SEQ ID NO: 1973 - RNA, 19 nt, Artificial Sequence
  Description of Artificial Sequence: Synthetic oligonucleotide
caaaacugccuuaaaauau

SEQ ID NO: 1974 - RNA, 19 nt, Artificial Sequence
  Description of Artificial Sequence: Synthetic oligonucleotide
aaaacugccuuaaaauauu

SEQ ID NO: 1975 - RNA, 19 nt, Artificial Sequence
  Description of Artificial Sequence: Synthetic oligonucleotide
aaacugccuuaaaauauuc

SEQ ID NO: 1976 - RNA, 19 nt, Artificial Sequence
  Description of Artificial Sequence: Synthetic oligonucleotide
aacugccuuaaaauauuca

SEQ ID NO: 1977 - RNA, 19 nt, Artificial Sequence
  Description of Artificial Sequence: Synthetic oligonucleotide
acugccuuaaaauauucau

SEQ ID NO: 1978 - RNA, 19 nt, Artificial Sequence
  Description of Artificial Sequence: Synthetic oligonucleotide
cugccuuaaaauauucaua

SEQ ID NO: 1979 - RNA, 19 nt, Artificial Sequence
  Description of Artificial Sequence: Synthetic oligonucleotide
ugccuuaaaauauucauag

SEQ ID NO: 1980 - RNA, 19 nt, Artificial Sequence
  Description of Artificial Sequence: Synthetic oligonucleotide
gccuuaaaauauucauagu

SEQ ID NO: 1981 - RNA, 19 nt, Artificial Sequence
  Description of Artificial Sequence: Synthetic oligonucleotide
ccuuaaaauauucauaguu

SEQ ID NO: 1982 - RNA, 19 nt, Artificial Sequence
  Description of Artificial Sequence: Synthetic oligonucleotide
cuuaaaauauucauaguua

SEQ ID NO: 1983 - RNA, 19 nt, Artificial Sequence
  Description of Artificial Sequence: Synthetic oligonucleotide
uuaaaauauucauaguuaa

SEQ ID NO: 1984 - RNA, 19 nt, Artificial Sequence
  Description of Artificial Sequence: Synthetic oligonucleotide
uaaaauauucauaguuaau

SEQ ID NO: 1985 - RNA, 19 nt, Artificial Sequence
  Description of Artificial Sequence: Synthetic oligonucleotide
aaaauauucauaguuaaua

SEQ ID NO: 1986 - RNA, 19 nt, Artificial Sequence
  Description of Artificial Sequence: Synthetic oligonucleotide
aaauauucauaguuaauac

SEQ ID NO: 1987 - RNA, 19 nt, Artificial Sequence
  Description of Artificial Sequence: Synthetic oligonucleotide
aauauucauaguuaauaca

SEQ ID NO: 1988 - RNA, 19 nt, Artificial Sequence
  Description of Artificial Sequence: Synthetic oligonucleotide
auauucauaguuaauacag

SEQ ID NO: 1989 - RNA, 19 nt, Artificial Sequence
  Description of Artificial Sequence: Synthetic oligonucleotide
uauucauaguuaauacagg

SEQ ID NO: 1990 - RNA, 19 nt, Artificial Sequence
  Description of Artificial Sequence: Synthetic oligonucleotide
auucauaguuaauacaggu

SEQ ID NO: 1991 - RNA, 19 nt, Artificial Sequence
  Description of Artificial Sequence: Synthetic oligonucleotide
uucauaguuaauacaggua

SEQ ID NO: 1992 - RNA, 19 nt, Artificial Sequence
  Description of Artificial Sequence: Synthetic oligonucleotide
ucauaguuaauacagguau

SEQ ID NO: 1993 - RNA, 19 nt, Artificial Sequence
  Description of Artificial Sequence: Synthetic oligonucleotide
cauaguuaauacagguaua

SEQ ID NO: 1994 - RNA, 19 nt, Artificial Sequence
  Description of Artificial Sequence: Synthetic oligonucleotide
auaguuaauacagguauau

SEQ ID NO: 1995 - RNA, 19 nt, Artificial Sequence
  Description of Artificial Sequence: Synthetic oligonucleotide
uaguuaauacagguauauc

SEQ ID NO: 1996 - RNA, 19 nt, Artificial Sequence
  Description of Artificial Sequence: Synthetic oligonucleotide
aguuaauacagguauaucu

SEQ ID NO: 1997 - RNA, 19 nt, Artificial Sequence
  Description of Artificial Sequence: Synthetic oligonucleotide
guuaauacagguauaucua

SEQ ID NO: 1998 - RNA, 19 nt, Artificial Sequence
  Description of Artificial Sequence: Synthetic oligonucleotide
uuaauacagguauaucuau

SEQ ID NO: 1999 - RNA, 19 nt, Artificial Sequence
  Description of Artificial Sequence: Synthetic oligonucleotide
uaauacagguauaucuauu

SEQ ID NO: 2000 - RNA, 19 nt, Artificial Sequence
  Description of Artificial Sequence: Synthetic oligonucleotide
aauacagguauaucuauuu

SEQ ID NO: 2001 - RNA, 19 nt, Artificial Sequence
  Description of Artificial Sequence: Synthetic oligonucleotide
auacagguauaucuauuuu

SEQ ID NO: 2002 - RNA, 19 nt, Artificial Sequence
  Description of Artificial Sequence: Synthetic oligonucleotide
uacagguauaucuauuuuu

SEQ ID NO: 2003 - RNA, 19 nt, Artificial Sequence
  Description of Artificial Sequence: Synthetic oligonucleotide
acagguauaucuauuuuua

SEQ ID NO: 2004 - RNA, 19 nt, Artificial Sequence
  Description of Artificial Sequence: Synthetic oligonucleotide
cagguauaucuauuuuuau

SEQ ID NO: 2005 - RNA, 19 nt, Artificial Sequence
  Description of Artificial Sequence: Synthetic oligonucleotide
agguauaucuauuuuuauu

SEQ ID NO: 2006 - RNA, 19 nt, Artificial Sequence
  Description of Artificial Sequence: Synthetic oligonucleotide
gguauaucuauuuuuauuu

SEQ ID NO: 2007 - RNA, 19 nt, Artificial Sequence
  Description of Artificial Sequence: Synthetic oligonucleotide
guauaucuauuuuuauuua

SEQ ID NO: 2008 - RNA, 19 nt, Artificial Sequence
  Description of Artificial Sequence: Synthetic oligonucleotide
uauaucuauuuuuauuuac

SEQ ID NO: 2009 - RNA, 19 nt, Artificial Sequence
  Description of Artificial Sequence: Synthetic oligonucleotide
auaucuauuuuuauuuacu

SEQ ID NO: 2010 - RNA, 19 nt, Artificial Sequence
  Description of Artificial Sequence: Synthetic oligonucleotide
uaucuauuuuuauuuacuu

SEQ ID NO: 2011 - RNA, 19 nt, Artificial Sequence
  Description of Artificial Sequence: Synthetic oligonucleotide
aucuauuuuuauuuacuuu

SEQ ID NO: 2012 - RNA, 19 nt, Artificial Sequence
  Description of Artificial Sequence: Synthetic oligonucleotide
ucuauuuuuauuuacuuug

SEQ ID NO: 2013 - RNA, 19 nt, Artificial Sequence
  Description of Artificial Sequence: Synthetic oligonucleotide
cuauuuuuauuuacuuugu

SEQ ID NO: 2014 - RNA, 19 nt, Artificial Sequence
  Description of Artificial Sequence: Synthetic oligonucleotide
uauuuuuauuuacuuugua

SEQ ID NO: 2015 - RNA, 19 nt, Artificial Sequence
  Description of Artificial Sequence: Synthetic oligonucleotide
auuuuuauuuacuuuguaa

SEQ ID NO: 2016 - RNA, 19 nt, Artificial Sequence
  Description of Artificial Sequence: Synthetic oligonucleotide
uuuuuauuuacuuuguaag

SEQ ID NO: 2017 - RNA, 19 nt, Artificial Sequence
  Description of Artificial Sequence: Synthetic oligonucleotide
uuuuauuuacuuuguaaga

SEQ ID NO: 2018 - RNA, 19 nt, Artificial Sequence
  Description of Artificial Sequence: Synthetic oligonucleotide
uuuauuuacuuuguaagaa

SEQ ID NO: 2019 - RNA, 19 nt, Artificial Sequence
  Description of Artificial Sequence: Synthetic oligonucleotide
uuauuuacuuuguaagaaa

SEQ ID NO: 2020 - RNA, 19 nt, Artificial Sequence
  Description of Artificial Sequence: Synthetic oligonucleotide
uauuuacuuuguaagaaac

SEQ ID NO: 2021 - RNA, 19 nt, Artificial Sequence
  Description of Artificial Sequence: Synthetic oligonucleotide
auuuacuuuguaagaaaca

SEQ ID NO: 2022 - RNA, 19 nt, Artificial Sequence
  Description of Artificial Sequence: Synthetic oligonucleotide
uuuacuuuguaagaaacaa

SEQ ID NO: 2023 - RNA, 19 nt, Artificial Sequence
  Description of Artificial Sequence: Synthetic oligonucleotide
uuacuuuguaagaaacaag

SEQ ID NO: 2024 - RNA, 19 nt, Artificial Sequence
  Description of Artificial Sequence: Synthetic oligonucleotide
uacuuuguaagaaacaagc

SEQ ID NO: 2025 - RNA, 19 nt, Artificial Sequence
  Description of Artificial Sequence: Synthetic oligonucleotide
acuuuguaagaaacaagcu

SEQ ID NO: 2026 - RNA, 19 nt, Artificial Sequence
  Description of Artificial Sequence: Synthetic oligonucleotide
cuuuguaagaaacaagcuc

SEQ ID NO: 2027 - RNA, 19 nt, Artificial Sequence
  Description of Artificial Sequence: Synthetic oligonucleotide
uuuguaagaaacaagcuca

SEQ ID NO: 2028 - RNA, 19 nt, Artificial Sequence
  Description of Artificial Sequence: Synthetic oligonucleotide
uuguaagaaacaagcucaa

SEQ ID NO: 2029 - RNA, 19 nt, Artificial Sequence
  Description of Artificial Sequence: Synthetic oligonucleotide
uguaagaaacaagcucaag

SEQ ID NO: 2030 - RNA, 19 nt, Artificial Sequence
  Description of Artificial Sequence: Synthetic oligonucleotide
guaagaaacaagcucaagg

SEQ ID NO: 2031 - RNA, 19 nt, Artificial Sequence
  Description of Artificial Sequence: Synthetic oligonucleotide
uaagaaacaagcucaagga

SEQ ID NO: 2032 - RNA, 19 nt, Artificial Sequence
  Description of Artificial Sequence: Synthetic oligonucleotide
aagaaacaagcucaaggag

SEQ ID NO: 2033 - RNA, 19 nt, Artificial Sequence
  Description of Artificial Sequence: Synthetic oligonucleotide
agaaacaagcucaaggagc

SEQ ID NO: 2034 - RNA, 19 nt, Artificial Sequence
  Description of Artificial Sequence: Synthetic oligonucleotide
gaaacaagcucaaggagcu

SEQ ID NO: 2035 - RNA, 19 nt, Artificial Sequence
  Description of Artificial Sequence: Synthetic oligonucleotide
aaacaagcucaaggagcuu

SEQ ID NO: 2036 - RNA, 19 nt, Artificial Sequence
  Description of Artificial Sequence: Synthetic oligonucleotide
aacaagcucaaggagcuuc

SEQ ID NO: 2037 - RNA, 19 nt, Artificial Sequence
  Description of Artificial Sequence: Synthetic oligonucleotide
acaagcucaaggagcuucc

SEQ ID NO: 2038 - RNA, 19 nt, Artificial Sequence
  Description of Artificial Sequence: Synthetic oligonucleotide
caagcucaaggagcuuccu

SEQ ID NO: 2039 - RNA, 19 nt, Artificial Sequence
  Description of Artificial Sequence: Synthetic oligonucleotide
aagcucaaggagcuuccuu

SEQ ID NO: 2040 - RNA, 19 nt, Artificial Sequence
  Description of Artificial Sequence: Synthetic oligonucleotide
agcucaaggagcuuccuuu

SEQ ID NO: 2041 - RNA, 19 nt, Artificial Sequence
  Description of Artificial Sequence: Synthetic oligonucleotide
gcucaaggagcuuccuuuu

SEQ ID NO: 2042 - RNA, 19 nt, Artificial Sequence
  Description of Artificial Sequence: Synthetic oligonucleotide
cucaaggagcuuccuuuua

SEQ ID NO: 2043 - RNA, 19 nt, Artificial Sequence
  Description of Artificial Sequence: Synthetic oligonucleotide
ucaaggagcuuccuuuuaa

SEQ ID NO: 2044 - RNA, 19 nt, Artificial Sequence
  Description of Artificial Sequence: Synthetic oligonucleotide
caaggagcuuccuuuuaaa

SEQ ID NO: 2045 - RNA, 19 nt, Artificial Sequence
  Description of Artificial Sequence: Synthetic oligonucleotide
aaggagcuuccuuuuaaau

SEQ ID NO: 2046 - RNA, 19 nt, Artificial Sequence
  Description of Artificial Sequence: Synthetic oligonucleotide
aggagcuuccuuuuaaauu

SEQ ID NO: 2047 - RNA, 19 nt, Artificial Sequence
  Description of Artificial Sequence: Synthetic oligonucleotide
ggagcuuccuuuuaaauuu

SEQ ID NO: 2048 - RNA, 19 nt, Artificial Sequence
  Description of Artificial Sequence: Synthetic oligonucleotide
gagcuuccuuuuaaauuuu

SEQ ID NO: 2049 - RNA, 19 nt, Artificial Sequence
  Description of Artificial Sequence: Synthetic oligonucleotide
agcuuccuuuuaaauuuug

SEQ ID NO: 2050 - RNA, 19 nt, Artificial Sequence
  Description of Artificial Sequence: Synthetic oligonucleotide
gcuuccuuuuaaauuuugu

SEQ ID NO: 2051 - RNA, 19 nt, Artificial Sequence
  Description of Artificial Sequence: Synthetic oligonucleotide
cuuccuuuuaaauuuuguc

SEQ ID NO: 2052 - RNA, 19 nt, Artificial Sequence
  Description of Artificial Sequence: Synthetic oligonucleotide
uuccuuuuaaauuuugucu

SEQ ID NO: 2053 - RNA, 19 nt, Artificial Sequence
  Description of Artificial Sequence: Synthetic oligonucleotide
uccuuuuaaauuuugucug

SEQ ID NO: 2054 - RNA, 19 nt, Artificial Sequence
  Description of Artificial Sequence: Synthetic oligonucleotide
ccuuuuaaauuuugucugu

SEQ ID NO: 2055 - RNA, 19 nt, Artificial Sequence
  Description of Artificial Sequence: Synthetic oligonucleotide
cuuuuaaauuuugucugua

SEQ ID NO: 2056 - RNA, 19 nt, Artificial Sequence
  Description of Artificial Sequence: Synthetic oligonucleotide
uuuuaaauuuugucuguag

SEQ ID NO: 2057 - RNA, 19 nt, Artificial Sequence
  Description of Artificial Sequence: Synthetic oligonucleotide
uuuaaauuuugucuguagg

SEQ ID NO: 2058 - RNA, 19 nt, Artificial Sequence
  Description of Artificial Sequence: Synthetic oligonucleotide
uuaaauuuugucuguagga

SEQ ID NO: 2059 - RNA, 19 nt, Artificial Sequence
  Description of Artificial Sequence: Synthetic oligonucleotide
uaaauuuugucuguaggaa

SEQ ID NO: 2060 - RNA, 19 nt, Artificial Sequence
  Description of Artificial Sequence: Synthetic oligonucleotide
aaauuuugucuguaggaaa

SEQ ID NO: 2061 - RNA, 19 nt, Artificial Sequence
  Description of Artificial Sequence: Synthetic oligonucleotide
aauuuugucuguaggaaau

SEQ ID NO: 2062 - RNA, 19 nt, Artificial Sequence
  Description of Artificial Sequence: Synthetic oligonucleotide
auuuugucuguaggaaaug

SEQ ID NO: 2063 - RNA, 19 nt, Artificial Sequence
  Description of Artificial Sequence: Synthetic oligonucleotide
uuuugucuguaggaaaugg

SEQ ID NO: 2064 - RNA, 19 nt, Artificial Sequence
  Description of Artificial Sequence: Synthetic oligonucleotide
uuugucuguaggaaauggu

SEQ ID NO: 2065 - RNA, 19 nt, Artificial Sequence
  Description of Artificial Sequence: Synthetic oligonucleotide
uugucuguaggaaaugguu

SEQ ID NO: 2066 - RNA, 19 nt, Artificial Sequence
  Description of Artificial Sequence: Synthetic oligonucleotide
ugucuguaggaaaugguug

SEQ ID NO: 2067 - RNA, 19 nt, Artificial Sequence
  Description of Artificial Sequence: Synthetic oligonucleotide
gucuguaggaaaugguuga

SEQ ID NO: 2068 - RNA, 19 nt, Artificial Sequence
  Description of Artificial Sequence: Synthetic oligonucleotide
ucuguaggaaaugguugaa

SEQ ID NO: 2069 - RNA, 19 nt, Artificial Sequence
  Description of Artificial Sequence: Synthetic oligonucleotide
cuguaggaaaugguugaaa

SEQ ID NO: 2070 - RNA, 19 nt, Artificial Sequence
  Description of Artificial Sequence: Synthetic oligonucleotide
uguaggaaaugguugaaaa

SEQ ID NO: 2071 - RNA, 19 nt, Artificial Sequence
  Description of Artificial Sequence: Synthetic oligonucleotide
guaggaaaugguugaaaac

SEQ ID NO: 2072 - RNA, 19 nt, Artificial Sequence
  Description of Artificial Sequence: Synthetic oligonucleotide
uaggaaaugguugaaaacu

SEQ ID NO: 2073 - RNA, 19 nt, Artificial Sequence
  Description of Artificial Sequence: Synthetic oligonucleotide
aggaaaugguugaaaacug

SEQ ID NO: 2074 - RNA, 19 nt, Artificial Sequence
  Description of Artificial Sequence: Synthetic oligonucleotide
ggaaaugguugaaaacuga

SEQ ID NO: 2075 - RNA, 19 nt, Artificial Sequence
  Description of Artificial Sequence: Synthetic oligonucleotide
gaaaugguugaaaacugaa

SEQ ID NO: 2076 - RNA, 19 nt, Artificial Sequence
  Description of Artificial Sequence: Synthetic oligonucleotide
aaaugguugaaaacugaag

SEQ ID NO: 2077 - RNA, 19 nt, Artificial Sequence
  Description of Artificial Sequence: Synthetic oligonucleotide
aaugguugaaaacugaagg

SEQ ID NO: 2078 - RNA, 19 nt, Artificial Sequence
  Description of Artificial Sequence: Synthetic oligonucleotide
augguugaaaacugaaggu

SEQ ID NO: 2079 - RNA, 19 nt, Artificial Sequence
  Description of Artificial Sequence: Synthetic oligonucleotide
ugguugaaaacugaaggua

SEQ ID NO: 2080 - RNA, 19 nt, Artificial Sequence
  Description of Artificial Sequence: Synthetic oligonucleotide
gguugaaaacugaagguag

SEQ ID NO: 2081 - RNA, 19 nt, Artificial Sequence
  Description of Artificial Sequence: Synthetic oligonucleotide
guugaaaacugaagguaga

SEQ ID NO: 2082 - RNA, 19 nt, Artificial Sequence
  Description of Artificial Sequence: Synthetic oligonucleotide
uugaaaacugaagguagau

SEQ ID NO: 2083 - RNA, 19 nt, Artificial Sequence
  Description of Artificial Sequence: Synthetic oligonucleotide
ugaaaacugaagguagaug

SEQ ID NO: 2084 - RNA, 19 nt, Artificial Sequence
  Description of Artificial Sequence: Synthetic oligonucleotide
gaaaacugaagguagaugg

SEQ ID NO: 2085 - RNA, 19 nt, Artificial Sequence
  Description of Artificial Sequence: Synthetic oligonucleotide
aaaacugaagguagauggu

SEQ ID NO: 2086 - RNA, 19 nt, Artificial Sequence
  Description of Artificial Sequence: Synthetic oligonucleotide
aaacugaagguagauggug

SEQ ID NO: 2087 - RNA, 19 nt, Artificial Sequence
  Description of Artificial Sequence: Synthetic oligonucleotide
aacugaagguagauggugu

SEQ ID NO: 2088 - RNA, 19 nt, Artificial Sequence
  Description of Artificial Sequence: Synthetic oligonucleotide
acugaagguagaugguguu

SEQ ID NO: 2089 - RNA, 19 nt, Artificial Sequence
  Description of Artificial Sequence: Synthetic oligonucleotide
cugaagguagaugguguua

SEQ ID NO: 2090 - RNA, 19 nt, Artificial Sequence
  Description of Artificial Sequence: Synthetic oligonucleotide
ugaagguagaugguguuau

SEQ ID NO: 2091 - RNA, 19 nt, Artificial Sequence
  Description of Artificial Sequence: Synthetic oligonucleotide
gaagguagaugguguuaua

SEQ ID NO: 2092 - RNA, 19 nt, Artificial Sequence
  Description of Artificial Sequence: Synthetic oligonucleotide
aagguagaugguguuauag

SEQ ID NO: 2093 - RNA, 19 nt, Artificial Sequence
  Description of Artificial Sequence: Synthetic oligonucleotide
agguagaugguguuauagu

SEQ ID NO: 2094 - RNA, 19 nt, Artificial Sequence
  Description of Artificial Sequence: Synthetic oligonucleotide
gguagaugguguuauaguu

SEQ ID NO: 2095 - RNA, 19 nt, Artificial Sequence
  Description of Artificial Sequence: Synthetic oligonucleotide
guagaugguguuauaguua

SEQ ID NO: 2096 - RNA, 19 nt, Artificial Sequence
  Description of Artificial Sequence: Synthetic oligonucleotide
uagaugguguuauaguuaa

SEQ ID NO: 2097 - RNA, 19 nt, Artificial Sequence
  Description of Artificial Sequence: Synthetic oligonucleotide
agaugguguuauaguuaau

SEQ ID NO: 2098 - RNA, 19 nt, Artificial Sequence
  Description of Artificial Sequence: Synthetic oligonucleotide
gaugguguuauaguuaaua

SEQ ID NO: 2099 - RNA, 19 nt, Artificial Sequence
  Description of Artificial Sequence: Synthetic oligonucleotide
augguguuauaguuaauaa

SEQ ID NO: 2100 - RNA, 19 nt, Artificial Sequence
  Description of Artificial Sequence: Synthetic oligonucleotide
ugguguuauaguuaauaau

SEQ ID NO: 2101 - RNA, 19 nt, Artificial Sequence
  Description of Artificial Sequence: Synthetic oligonucleotide
gguguuauaguuaauaaua

SEQ ID NO: 2102 - RNA, 19 nt, Artificial Sequence
  Description of Artificial Sequence: Synthetic oligonucleotide
guguuauaguuaauaauaa

SEQ ID NO: 2103 - RNA, 19 nt, Artificial Sequence
  Description of Artificial Sequence: Synthetic oligonucleotide
uguuauaguuaauaauaaa

SEQ ID NO: 2104 - RNA, 19 nt, Artificial Sequence
  Description of Artificial Sequence: Synthetic oligonucleotide
guuauaguuaauaauaaau

SEQ ID NO: 2105 - RNA, 19 nt, Artificial Sequence
  Description of Artificial Sequence: Synthetic oligonucleotide
uuauaguuaauaauaaaug

SEQ ID NO: 2106 - RNA, 19 nt, Artificial Sequence
  Description of Artificial Sequence: Synthetic oligonucleotide
uauaguuaauaauaaaugc

SEQ ID NO: 2107 - RNA, 19 nt, Artificial Sequence
  Description of Artificial Sequence: Synthetic oligonucleotide
auaguuaauaauaaaugcu

SEQ ID NO: 2108 - RNA, 19 nt, Artificial Sequence
  Description of Artificial Sequence: Synthetic oligonucleotide
uaguuaauaauaaaugcug

SEQ ID NO: 2109 - RNA, 19 nt, Artificial Sequence
  Description of Artificial Sequence: Synthetic oligonucleotide
aguuaauaauaaaugcugu

SEQ ID NO: 2110 - RNA, 19 nt, Artificial Sequence
  Description of Artificial Sequence: Synthetic oligonucleotide
guuaauaauaaaugcugua

SEQ ID NO: 2111 - RNA, 19 nt, Artificial Sequence
  Description of Artificial Sequence: Synthetic oligonucleotide
uuaauaauaaaugcuguaa

SEQ ID NO: 2112 - RNA, 19 nt, Artificial Sequence
  Description of Artificial Sequence: Synthetic oligonucleotide
uaauaauaaaugcuguaaa

SEQ ID NO: 2113 - RNA, 19 nt, Artificial Sequence
  Description of Artificial Sequence: Synthetic oligonucleotide
aauaauaaaugcuguaaau

SEQ ID NO: 2114 - RNA, 19 nt, Artificial Sequence
  Description of Artificial Sequence: Synthetic oligonucleotide
auaauaaaugcuguaaaua

SEQ ID NO: 2115 - RNA, 19 nt, Artificial Sequence
  Description of Artificial Sequence: Synthetic oligonucleotide
uaauaaaugcuguaaauaa

SEQ ID NO: 2116 - RNA, 19 nt, Artificial Sequence
  Description of Artificial Sequence: Synthetic oligonucleotide
aauaaaugcuguaaauaag

SEQ ID NO: 2117 - RNA, 19 nt, Artificial Sequence
  Description of Artificial Sequence: Synthetic oligonucleotide
auaaaugcuguaaauaagc

SEQ ID NO: 2118 - RNA, 19 nt, Artificial Sequence
  Description of Artificial Sequence: Synthetic oligonucleotide
uaaaugcuguaaauaagca

SEQ ID NO: 2119 - RNA, 19 nt, Artificial Sequence
  Description of Artificial Sequence: Synthetic oligonucleotide
aaaugcuguaaauaagcau

SEQ ID NO: 2120 - RNA, 19 nt, Artificial Sequence
  Description of Artificial Sequence: Synthetic oligonucleotide
aaugcuguaaauaagcauc

SEQ ID NO: 2121 - RNA, 19 nt, Artificial Sequence
  Description of Artificial Sequence: Synthetic oligonucleotide
augcuguaaauaagcaucu

SEQ ID NO: 2122 - RNA, 19 nt, Artificial Sequence
  Description of Artificial Sequence: Synthetic oligonucleotide
ugcuguaaauaagcaucuc

SEQ ID NO: 2123 - RNA, 19 nt, Artificial Sequence
  Description of Artificial Sequence: Synthetic oligonucleotide
gcuguaaauaagcaucuca

SEQ ID NO: 2124 - RNA, 19 nt, Artificial Sequence
  Description of Artificial Sequence: Synthetic oligonucleotide
cuguaaauaagcaucucac

SEQ ID NO: 2125 - RNA, 19 nt, Artificial Sequence
  Description of Artificial Sequence: Synthetic oligonucleotide
uguaaauaagcaucucacu

SEQ ID NO: 2126 - RNA, 19 nt, Artificial Sequence
  Description of Artificial Sequence: Synthetic oligonucleotide
guaaauaagcaucucacuu

SEQ ID NO: 2127 - RNA, 19 nt, Artificial Sequence
  Description of Artificial Sequence: Synthetic oligonucleotide
uaaauaagcaucucacuuu

SEQ ID NO: 2128 - RNA, 19 nt, Artificial Sequence
  Description of Artificial Sequence: Synthetic oligonucleotide
aaauaagcaucucacuuug

SEQ ID NO: 2129 - RNA, 19 nt, Artificial Sequence
  Description of Artificial Sequence: Synthetic oligonucleotide
aauaagcaucucacuuugu

SEQ ID NO: 2130 - RNA, 19 nt, Artificial Sequence
  Description of Artificial Sequence: Synthetic oligonucleotide
auaagcaucucacuuugua

SEQ ID NO: 2131 - RNA, 19 nt, Artificial Sequence
  Description of Artificial Sequence: Synthetic oligonucleotide
uaagcaucucacuuuguaa

SEQ ID NO: 2132 - RNA, 19 nt, Artificial Sequence
  Description of Artificial Sequence: Synthetic oligonucleotide
aagcaucucacuuuguaaa

SEQ ID NO: 2133 - RNA, 19 nt, Artificial Sequence
  Description of Artificial Sequence: Synthetic oligonucleotide
agcaucucacuuuguaaaa

SEQ ID NO: 2134 - RNA, 19 nt, Artificial Sequence
  Description of Artificial Sequence: Synthetic oligonucleotide
gcaucucacuuuguaaaaa

SEQ ID NO: 2135 - RNA, 19 nt, Artificial Sequence
  Description of Artificial Sequence: Synthetic oligonucleotide
caucucacuuuguaaaaau

SEQ ID NO: 2136 - RNA, 19 nt, Artificial Sequence
  Description of Artificial Sequence: Synthetic oligonucleotide
aucucacuuuguaaaaaua

SEQ ID NO: 2137 - RNA, 19 nt, Artificial Sequence
  Description of Artificial Sequence: Synthetic oligonucleotide
ucucacuuuguaaaaauaa

SEQ ID NO: 2138 - RNA, 19 nt, Artificial Sequence
  Description of Artificial Sequence: Synthetic oligonucleotide
cucacuuuguaaaaauaaa

SEQ ID NO: 2139 - RNA, 19 nt, Artificial Sequence
  Description of Artificial Sequence: Synthetic oligonucleotide
ucacuuuguaaaaauaaaa

SEQ ID NO: 2140 - RNA, 19 nt, Artificial Sequence
  Description of Artificial Sequence: Synthetic oligonucleotide
cacuuuguaaaaauaaaau

SEQ ID NO: 2141 - RNA, 19 nt, Artificial Sequence
  Description of Artificial Sequence: Synthetic oligonucleotide
acuuuguaaaaauaaaaua

SEQ ID NO: 2142 - RNA, 19 nt, Artificial Sequence
  Description of Artificial Sequence: Synthetic oligonucleotide
cuuuguaaaaauaaaauau

SEQ ID NO: 2143 - RNA, 19 nt, Artificial Sequence
  Description of Artificial Sequence: Synthetic oligonucleotide
uuuguaaaaauaaaauauu

SEQ ID NO: 2144 - RNA, 19 nt, Artificial Sequence
  Description of Artificial Sequence: Synthetic oligonucleotide
uuguaaaaauaaaauauug

SEQ ID NO: 2145 - RNA, 19 nt, Artificial Sequence
  Description of Artificial Sequence: Synthetic oligonucleotide
uguaaaaauaaaauauugu

SEQ ID NO: 2146 - RNA, 19 nt, Artificial Sequence
  Description of Artificial Sequence: Synthetic oligonucleotide
guaaaaauaaaauauugug

SEQ ID NO: 2147 - RNA, 19 nt, Artificial Sequence
  Description of Artificial Sequence: Synthetic oligonucleotide
uaaaaauaaaauauugugg

SEQ ID NO: 2148 - RNA, 19 nt, Artificial Sequence
  Description of Artificial Sequence: Synthetic oligonucleotide
aaaaauaaaauauuguggu

SEQ ID NO: 2149 - RNA, 19 nt, Artificial Sequence
  Description of Artificial Sequence: Synthetic oligonucleotide
aaaauaaaauauugugguu

SEQ ID NO: 2150 - RNA, 19 nt, Artificial Sequence
  Description of Artificial Sequence: Synthetic oligonucleotide
aaauaaaauauugugguuu

SEQ ID NO: 2151 - RNA, 19 nt, Artificial Sequence
  Description of Artificial Sequence: Synthetic oligonucleotide
aauaaaauauugugguuuu

SEQ ID NO: 2152 - RNA, 19 nt, Artificial Sequence
  Description of Artificial Sequence: Synthetic oligonucleotide
auaaaauauugugguuuug

SEQ ID NO: 2153 - RNA, 19 nt, Artificial Sequence
  Description of Artificial Sequence: Synthetic oligonucleotide
uaaaauauugugguuuugu

SEQ ID NO: 2154 - RNA, 19 nt, Artificial Sequence
  Description of Artificial Sequence: Synthetic oligonucleotide
aaaauauugugguuuuguu

SEQ ID NO: 2155 - RNA, 19 nt, Artificial Sequence
  Description of Artificial Sequence: Synthetic oligonucleotide
aaauauugugguuuuguuu

SEQ ID NO: 2156 - RNA, 19 nt, Artificial Sequence
  Description of Artificial Sequence: Synthetic oligonucleotide
aauauugugguuuuguuuu

SEQ ID NO: 2157 - RNA, 19 nt, Artificial Sequence
  Description of Artificial Sequence: Synthetic oligonucleotide
auauugugguuuuguuuua

SEQ ID NO: 2158 - RNA, 19 nt, Artificial Sequence
  Description of Artificial Sequence: Synthetic oligonucleotide
uauugugguuuuguuuuaa

SEQ ID NO: 2159 - RNA, 19 nt, Artificial Sequence
  Description of Artificial Sequence: Synthetic oligonucleotide
auugugguuuuguuuuaaa

SEQ ID NO: 2160 - RNA, 19 nt, Artificial Sequence
  Description of Artificial Sequence: Synthetic oligonucleotide
uugugguuuuguuuuaaac

SEQ ID NO: 2161 - RNA, 19 nt, Artificial Sequence
  Description of Artificial Sequence: Synthetic oligonucleotide
ugugguuuuguuuuaaaca

SEQ ID NO: 2162 - RNA, 19 nt, Artificial Sequence
  Description of Artificial Sequence: Synthetic oligonucleotide
gugguuuuguuuuaaacau

SEQ ID NO: 2163 - RNA, 19 nt, Artificial Sequence
  Description of Artificial Sequence: Synthetic oligonucleotide
ugguuuuguuuuaaacauu

SEQ ID NO: 2164 - RNA, 19 nt, Artificial Sequence
  Description of Artificial Sequence: Synthetic oligonucleotide
gguuuuguuuuaaacauuc

SEQ ID NO: 2165 - RNA, 19 nt, Artificial Sequence
  Description of Artificial Sequence: Synthetic oligonucleotide
guuuuguuuuaaacauuca

SEQ ID NO: 2166 - RNA, 19 nt, Artificial Sequence
  Description of Artificial Sequence: Synthetic oligonucleotide
uuuuguuuuaaacauucaa

SEQ ID NO: 2167 - RNA, 19 nt, Artificial Sequence
  Description of Artificial Sequence: Synthetic oligonucleotide
uuuguuuuaaacauucaac

SEQ ID NO: 2168 - RNA, 19 nt, Artificial Sequence
  Description of Artificial Sequence: Synthetic oligonucleotide
uuguuuuaaacauucaacg

SEQ ID NO: 2169 - RNA, 19 nt, Artificial Sequence
  Description of Artificial Sequence: Synthetic oligonucleotide
uguuuuaaacauucaacgu

SEQ ID NO: 2170 - RNA, 19 nt, Artificial Sequence
  Description of Artificial Sequence: Synthetic oligonucleotide
guuuuaaacauucaacguu

SEQ ID NO: 2171 - RNA, 19 nt, Artificial Sequence
  Description of Artificial Sequence: Synthetic oligonucleotide
uuuuaaacauucaacguuu

SEQ ID NO: 2172 - RNA, 19 nt, Artificial Sequence
  Description of Artificial Sequence: Synthetic oligonucleotide
uuuaaacauucaacguuuc

SEQ ID NO: 2173 - RNA, 19 nt, Artificial Sequence
  Description of Artificial Sequence: Synthetic oligonucleotide
uuaaacauucaacguuucu

SEQ ID NO: 2174 - RNA, 19 nt, Artificial Sequence
  Description of Artificial Sequence: Synthetic oligonucleotide
uaaacauucaacguuucuu

SEQ ID NO: 2175 - RNA, 19 nt, Artificial Sequence
  Description of Artificial Sequence: Synthetic oligonucleotide
aaacauucaacguuucuuu

SEQ ID NO: 2176 - RNA, 19 nt, Artificial Sequence
  Description of Artificial Sequence: Synthetic oligonucleotide
aacauucaacguuucuuuu

SEQ ID NO: 2177 - RNA, 19 nt, Artificial Sequence
  Description of Artificial Sequence: Synthetic oligonucleotide
acauucaacguuucuuuuc

SEQ ID NO: 2178 - RNA, 19 nt, Artificial Sequence
  Description of Artificial Sequence: Synthetic oligonucleotide
cauucaacguuucuuuucc

SEQ ID NO: 2179 - RNA, 19 nt, Artificial Sequence
  Description of Artificial Sequence: Synthetic oligonucleotide
auucaacguuucuuuuccu

SEQ ID NO: 2180 - RNA, 19 nt, Artificial Sequence
  Description of Artificial Sequence: Synthetic oligonucleotide
uucaacguuucuuuuccuu

SEQ ID NO: 2181 - RNA, 19 nt, Artificial Sequence
  Description of Artificial Sequence: Synthetic oligonucleotide
ucaacguuucuuuuccuuc

SEQ ID NO: 2182 - RNA, 19 nt, Artificial Sequence
  Description of Artificial Sequence: Synthetic oligonucleotide
caacguuucuuuuccuucu

SEQ ID NO: 2183 - RNA, 19 nt, Artificial Sequence
  Description of Artificial Sequence: Synthetic oligonucleotide
aacguuucuuuuccuucua

SEQ ID NO: 2184 - RNA, 19 nt, Artificial Sequence
  Description of Artificial Sequence: Synthetic oligonucleotide
acguuucuuuuccuucuac

SEQ ID NO: 2185 - RNA, 19 nt, Artificial Sequence
  Description of Artificial Sequence: Synthetic oligonucleotide
cguuucuuuuccuucuaca

SEQ ID NO: 2186 - RNA, 19 nt, Artificial Sequence
  Description of Artificial Sequence: Synthetic oligonucleotide
guuucuuuuccuucuacaa

SEQ ID NO: 2187 - RNA, 19 nt, Artificial Sequence
  Description of Artificial Sequence: Synthetic oligonucleotide
uuucuuuuccuucuacaau

SEQ ID NO: 2188 - RNA, 19 nt, Artificial Sequence
  Description of Artificial Sequence: Synthetic oligonucleotide
uucuuuuccuucuacaaua

SEQ ID NO: 2189 - RNA, 19 nt, Artificial Sequence
  Description of Artificial Sequence: Synthetic oligonucleotide
ucuuuuccuucuacaauaa

SEQ ID NO: 2190 - RNA, 19 nt, Artificial Sequence
  Description of Artificial Sequence: Synthetic oligonucleotide
cuuuuccuucuacaauaaa

SEQ ID NO: 2191 - RNA, 19 nt, Artificial Sequence
  Description of Artificial Sequence: Synthetic oligonucleotide
uuuuccuucuacaauaaac

SEQ ID NO: 2192 - RNA, 19 nt, Artificial Sequence
  Description of Artificial Sequence: Synthetic oligonucleotide
uuuccuucuacaauaaaca

SEQ ID NO: 2193 - RNA, 19 nt, Artificial Sequence
  Description of Artificial Sequence: Synthetic oligonucleotide
uuccuucuacaauaaacac

SEQ ID NO: 2194 - RNA, 19 nt, Artificial Sequence
  Description of Artificial Sequence: Synthetic oligonucleotide
uccuucuacaauaaacacu

SEQ ID NO: 2195 - RNA, 19 nt, Artificial Sequence
  Description of Artificial Sequence: Synthetic oligonucleotide
ccuucuacaauaaacacuu

SEQ ID NO: 2196 - RNA, 19 nt, Artificial Sequence
  Description of Artificial Sequence: Synthetic oligonucleotide
cuucuacaauaaacacuuu

SEQ ID NO: 2197 - RNA, 19 nt, Artificial Sequence
  Description of Artificial Sequence: Synthetic oligonucleotide
uucuacaauaaacacuuuc

SEQ ID NO: 2198 - RNA, 19 nt, Artificial Sequence
  Description of Artificial Sequence: Synthetic oligonucleotide
ucuacaauaaacacuuuca

SEQ ID NO: 2199 - RNA, 19 nt, Artificial Sequence
  Description of Artificial Sequence: Synthetic oligonucleotide
cuacaauaaacacuuucaa

SEQ ID NO: 2200 - RNA, 19 nt, Artificial Sequence
  Description of Artificial Sequence: Synthetic oligonucleotide
uacaauaaacacuuucaaa

SEQ ID NO: 2201 - RNA, 19 nt, Artificial Sequence
  Description of Artificial Sequence: Synthetic oligonucleotide
acaauaaacacuuucaaaa

SEQ ID NO: 2202 - RNA, 19 nt, Artificial Sequence
  Description of Artificial Sequence: Synthetic oligonucleotide
caauaaacacuuucaaaau

SEQ ID NO: 2203 - RNA, 19 nt, Artificial Sequence
  Description of Artificial Sequence: Synthetic oligonucleotide
aauaaacacuuucaaaaug

SEQ ID NO: 2204 - RNA, 19 nt, Artificial Sequence
  Description of Artificial Sequence: Synthetic oligonucleotide
auaaacacuuucaaaaugu

SEQ ID NO: 2205 - RNA, 19 nt, Artificial Sequence
  Description of Artificial Sequence: Synthetic oligonucleotide
uaaacacuuucaaaaugug

SEQ ID NO: 2206 - RNA, 19 nt, Artificial Sequence
  Description of Artificial Sequence: Synthetic oligonucleotide
aaacacuuucaaaauguga

SEQ ID NO: 2207 - RNA, 19 nt, Artificial Sequence
  Description of Artificial Sequence: Synthetic oligonucleotide
uagcuuuccuuccaagccc

SEQ ID NO: 2208 - RNA, 19 nt, Artificial Sequence
  Description of Artificial Sequence: Synthetic oligonucleotide
auagcuuuccuuccaagcc

SEQ ID NO: 2209 - RNA, 19 nt, Artificial Sequence
  Description of Artificial Sequence: Synthetic oligonucleotide
uauagcuuuccuuccaagc

SEQ ID NO: 2210 - RNA, 19 nt, Artificial Sequence
  Description of Artificial Sequence: Synthetic oligonucleotide
cuauagcuuuccuuccaag

SEQ ID NO: 2211 - RNA, 19 nt, Artificial Sequence
  Description of Artificial Sequence: Synthetic oligonucleotide
ccuauagcuuuccuuccaa

SEQ ID NO: 2212 - RNA, 19 nt, Artificial Sequence
  Description of Artificial Sequence: Synthetic oligonucleotide
gccuauagcuuuccuucca

SEQ ID NO: 2213 - RNA, 19 nt, Artificial Sequence
  Description of Artificial Sequence: Synthetic oligonucleotide
agccuauagcuuuccuucc

SEQ ID NO: 2214 - RNA, 19 nt, Artificial Sequence
  Description of Artificial Sequence: Synthetic oligonucleotide
uagccuauagcuuuccuuc

SEQ ID NO: 2215 - RNA, 19 nt, Artificial Sequence
  Description of Artificial Sequence: Synthetic oligonucleotide
guagccuauagcuuuccuu

SEQ ID NO: 2216 - RNA, 19 nt, Artificial Sequence
  Description of Artificial Sequence: Synthetic oligonucleotide
gguagccuauagcuuuccu

SEQ ID NO: 2217 - RNA, 19 nt, Artificial Sequence
  Description of Artificial Sequence: Synthetic oligonucleotide
ggguagccuauagcuuucc

SEQ ID NO: 2218 - RNA, 19 nt, Artificial Sequence
  Description of Artificial Sequence: Synthetic oligonucleotide
uggguagccuauagcuuuc

SEQ ID NO: 2219 - RNA, 19 nt, Artificial Sequence
  Description of Artificial Sequence: Synthetic oligonucleotide
auggguagccuauagcuuu

SEQ ID NO: 2220 - RNA, 19 nt, Artificial Sequence
  Description of Artificial Sequence: Synthetic oligonucleotide
aauggguagccuauagcuu

SEQ ID NO: 2221 - RNA, 19 nt, Artificial Sequence
  Description of Artificial Sequence: Synthetic oligonucleotide
gaauggguagccuauagcu

SEQ ID NO: 2222 - RNA, 19 nt, Artificial Sequence
  Description of Artificial Sequence: Synthetic oligonucleotide
ugaauggguagccuauagc

SEQ ID NO: 2223 - RNA, 19 nt, Artificial Sequence
  Description of Artificial Sequence: Synthetic oligonucleotide
cugaauggguagccuauag

SEQ ID NO: 2224 - RNA, 19 nt, Artificial Sequence
  Description of Artificial Sequence: Synthetic oligonucleotide
gcugaauggguagccuaua

SEQ ID NO: 2225 - RNA, 19 nt, Artificial Sequence
  Description of Artificial Sequence: Synthetic oligonucleotide
agcugaauggguagccuau

SEQ ID NO: 2226 - RNA, 19 nt, Artificial Sequence
  Description of Artificial Sequence: Synthetic oligonucleotide
gagcugaauggguagccua

SEQ ID NO: 2227 - RNA, 19 nt, Artificial Sequence
  Description of Artificial Sequence: Synthetic oligonucleotide
ggagcugaauggguagccu

SEQ ID NO: 2228 - RNA, 19 nt, Artificial Sequence
  Description of Artificial Sequence: Synthetic oligonucleotide
gggagcugaauggguagcc

SEQ ID NO: 2229 - RNA, 19 nt, Artificial Sequence
  Description of Artificial Sequence: Synthetic oligonucleotide
ggggagcugaauggguagc

SEQ ID NO: 2230 - RNA, 19 nt, Artificial Sequence
  Description of Artificial Sequence: Synthetic oligonucleotide
aggggagcugaauggguag

SEQ ID NO: 2231 - RNA, 19 nt, Artificial Sequence
  Description of Artificial Sequence: Synthetic oligonucleotide
caggggagcugaaugggua

SEQ ID NO: 2232 - RNA, 19 nt, Artificial Sequence
  Description of Artificial Sequence: Synthetic oligonucleotide
acaggggagcugaaugggu

SEQ ID NO: 2233 - RNA, 19 nt, Artificial Sequence
  Description of Artificial Sequence: Synthetic oligonucleotide
gacaggggagcugaauggg

SEQ ID NO: 2234 - RNA, 19 nt, Artificial Sequence
  Description of Artificial Sequence: Synthetic oligonucleotide
ugacaggggagcugaaugg

SEQ ID NO: 2235 - RNA, 19 nt, Artificial Sequence
  Description of Artificial Sequence: Synthetic oligonucleotide
cugacaggggagcugaaug

SEQ ID NO: 2236 - RNA, 19 nt, Artificial Sequence
  Description of Artificial Sequence: Synthetic oligonucleotide
ucugacaggggagcugaau

SEQ ID NO: 2237 - RNA, 19 nt, Artificial Sequence
  Description of Artificial Sequence: Synthetic oligonucleotide
cucugacaggggagcugaa

SEQ ID NO: 2238 - RNA, 19 nt, Artificial Sequence
  Description of Artificial Sequence: Synthetic oligonucleotide
ucucugacaggggagcuga

SEQ ID NO: 2239 - RNA, 19 nt, Artificial Sequence
  Description of Artificial Sequence: Synthetic oligonucleotide
gucucugacaggggagcug

SEQ ID NO: 2240 - RNA, 19 nt, Artificial Sequence
  Description of Artificial Sequence: Synthetic oligonucleotide
agucucugacaggggagcu

SEQ ID NO: 2241 - RNA, 19 nt, Artificial Sequence
  Description of Artificial Sequence: Synthetic oligonucleotide
gagucucugacaggggagc

SEQ ID NO: 2242 - RNA, 19 nt, Artificial Sequence
  Description of Artificial Sequence: Synthetic oligonucleotide
ugagucucugacaggggag

SEQ ID NO: 2243 - RNA, 19 nt, Artificial Sequence
  Description of Artificial Sequence: Synthetic oligonucleotide
uugagucucugacagggga

SEQ ID NO: 2244 - RNA, 19 nt, Artificial Sequence
  Description of Artificial Sequence: Synthetic oligonucleotide
cuugagucucugacagggg

SEQ ID NO: 2245 - RNA, 19 nt, Artificial Sequence
  Description of Artificial Sequence: Synthetic oligonucleotide
gcuugagucucugacaggg

SEQ ID NO: 2246 - RNA, 19 nt, Artificial Sequence
  Description of Artificial Sequence: Synthetic oligonucleotide
agcuugagucucugacagg

SEQ ID NO: 2247 - RNA, 19 nt, Artificial Sequence
  Description of Artificial Sequence: Synthetic oligonucleotide
aagcuugagucucugacag

SEQ ID NO: 2248 - RNA, 19 nt, Artificial Sequence
  Description of Artificial Sequence: Synthetic oligonucleotide
aaagcuugagucucugaca

SEQ ID NO: 2249 - RNA, 19 nt, Artificial Sequence
  Description of Artificial Sequence: Synthetic oligonucleotide
caaagcuugagucucugac

SEQ ID NO: 2250 - RNA, 19 nt, Artificial Sequence
  Description of Artificial Sequence: Synthetic oligonucleotide
ucaaagcuugagucucuga

SEQ ID NO: 2251 - RNA, 19 nt, Artificial Sequence
  Description of Artificial Sequence: Synthetic oligonucleotide
cucaaagcuugagucucug

SEQ ID NO: 2252 - RNA, 19 nt, Artificial Sequence
  Description of Artificial Sequence: Synthetic oligonucleotide
ucucaaagcuugagucucu

SEQ ID NO: 2253 - RNA, 19 nt, Artificial Sequence
  Description of Artificial Sequence: Synthetic oligonucleotide
uucucaaagcuugagucuc

SEQ ID NO: 2254 - RNA, 19 nt, Artificial Sequence
  Description of Artificial Sequence: Synthetic oligonucleotide
uuucucaaagcuugagucu

SEQ ID NO: 2255 - RNA, 19 nt, Artificial Sequence
  Description of Artificial Sequence: Synthetic oligonucleotide
cuuucucaaagcuugaguc

SEQ ID NO: 2256 - RNA, 19 nt, Artificial Sequence
  Description of Artificial Sequence: Synthetic oligonucleotide
ccuuucucaaagcuugagu

SEQ ID NO: 2257 - RNA, 19 nt, Artificial Sequence
  Description of Artificial Sequence: Synthetic oligonucleotide
gccuuucucaaagcuugag

SEQ ID NO: 2258 - RNA, 19 nt, Artificial Sequence
  Description of Artificial Sequence: Synthetic oligonucleotide
agccuuucucaaagcuuga

SEQ ID NO: 2259 - RNA, 19 nt, Artificial Sequence
  Description of Artificial Sequence: Synthetic oligonucleotide
uagccuuucucaaagcuug

SEQ ID NO: 2260 - RNA, 19 nt, Artificial Sequence
  Description of Artificial Sequence: Synthetic oligonucleotide
cuagccuuucucaaagcuu

SEQ ID NO: 2261 - RNA, 19 nt, Artificial Sequence
  Description of Artificial Sequence: Synthetic oligonucleotide
gcuagccuuucucaaagcu

SEQ ID NO: 2262 - RNA, 19 nt, Artificial Sequence
  Description of Artificial Sequence: Synthetic oligonucleotide
ugcuagccuuucucaaagc

SEQ ID NO: 2263 - RNA, 19 nt, Artificial Sequence
  Description of Artificial Sequence: Synthetic oligonucleotide
uugcuagccuuucucaaag

SEQ ID NO: 2264 - RNA, 19 nt, Artificial Sequence
  Description of Artificial Sequence: Synthetic oligonucleotide
uuugcuagccuuucucaaa

SEQ ID NO: 2265 - RNA, 19 nt, Artificial Sequence
  Description of Artificial Sequence: Synthetic oligonucleotide
cuuugcuagccuuucucaa

SEQ ID NO: 2266 - RNA, 19 nt, Artificial Sequence
  Description of Artificial Sequence: Synthetic oligonucleotide
ucuuugcuagccuuucuca

SEQ ID NO: 2267 - RNA, 19 nt, Artificial Sequence
  Description of Artificial Sequence: Synthetic oligonucleotide
cucuuugcuagccuuucuc

SEQ ID NO: 2268 - RNA, 19 nt, Artificial Sequence
  Description of Artificial Sequence: Synthetic oligonucleotide
gcucuuugcuagccuuucu

SEQ ID NO: 2269 - RNA, 19 nt, Artificial Sequence
  Description of Artificial Sequence: Synthetic oligonucleotide
ugcucuuugcuagccuuuc

SEQ ID NO: 2270 - RNA, 19 nt, Artificial Sequence
  Description of Artificial Sequence: Synthetic oligonucleotide
uugcucuuugcuagccuuu

SEQ ID NO: 2271 - RNA, 19 nt, Artificial Sequence
  Description of Artificial Sequence: Synthetic oligonucleotide
cuugcucuuugcuagccuu

SEQ ID NO: 2272 - RNA, 19 nt, Artificial Sequence
  Description of Artificial Sequence: Synthetic oligonucleotide
ccuugcucuuugcuagccu

SEQ ID NO: 2273 - RNA, 19 nt, Artificial Sequence
  Description of Artificial Sequence: Synthetic oligonucleotide
uccuugcucuuugcuagcc

SEQ ID NO: 2274 - RNA, 19 nt, Artificial Sequence
  Description of Artificial Sequence: Synthetic oligonucleotide
uuccuugcucuuugcuagc

SEQ ID NO: 2275 - RNA, 19 nt, Artificial Sequence
  Description of Artificial Sequence: Synthetic oligonucleotide
uuuccuugcucuuugcuag

SEQ ID NO: 2276 - RNA, 19 nt, Artificial Sequence
  Description of Artificial Sequence: Synthetic oligonucleotide
cuuuccuugcucuuugcua

SEQ ID NO: 2277 - RNA, 19 nt, Artificial Sequence
  Description of Artificial Sequence: Synthetic oligonucleotide
ucuuuccuugcucuuugcu

SEQ ID NO: 2278 - RNA, 19 nt, Artificial Sequence
  Description of Artificial Sequence: Synthetic oligonucleotide
cucuuuccuugcucuuugc

SEQ ID NO: 2279 - RNA, 19 nt, Artificial Sequence
  Description of Artificial Sequence: Synthetic oligonucleotide
ucucuuuccuugcucuuug

SEQ ID NO: 2280 - RNA, 19 nt, Artificial Sequence
  Description of Artificial Sequence: Synthetic oligonucleotide
cucucuuuccuugcucuuu

SEQ ID NO: 2281 - RNA, 19 nt, Artificial Sequence
  Description of Artificial Sequence: Synthetic oligonucleotide
ucucucuuuccuugcucuu

SEQ ID NO: 2282 - RNA, 19 nt, Artificial Sequence
  Description of Artificial Sequence: Synthetic oligonucleotide
uucucucuuuccuugcucu

SEQ ID NO: 2283 - RNA, 19 nt, Artificial Sequence
  Description of Artificial Sequence: Synthetic oligonucleotide
uuucucucuuuccuugcuc

SEQ ID NO: 2284 - RNA, 19 nt, Artificial Sequence
  Description of Artificial Sequence: Synthetic oligonucleotide
uuuucucucuuuccuugcu

SEQ ID NO: 2285 - RNA, 19 nt, Artificial Sequence
  Description of Artificial Sequence: Synthetic oligonucleotide
guuuucucucuuuccuugc

SEQ ID NO: 2286 - RNA, 19 nt, Artificial Sequence
  Description of Artificial Sequence: Synthetic oligonucleotide
uguuuucucucuuuccuug

SEQ ID NO: 2287 - RNA, 19 nt, Artificial Sequence
  Description of Artificial Sequence: Synthetic oligonucleotide
uuguuuucucucuuuccuu

SEQ ID NO: 2288 - RNA, 19 nt, Artificial Sequence
  Description of Artificial Sequence: Synthetic oligonucleotide
guuguuuucucucuuuccu

SEQ ID NO: 2289 - RNA, 19 nt, Artificial Sequence
  Description of Artificial Sequence: Synthetic oligonucleotide
uguuguuuucucucuuucc

SEQ ID NO: 2290 - RNA, 19 nt, Artificial Sequence
  Description of Artificial Sequence: Synthetic oligonucleotide
uuguuguuuucucucuuuc

SEQ ID NO: 2291 - RNA, 19 nt, Artificial Sequence
  Description of Artificial Sequence: Synthetic oligonucleotide
uuuguuguuuucucucuuu

SEQ ID NO: 2292 - RNA, 19 nt, Artificial Sequence
  Description of Artificial Sequence: Synthetic oligonucleotide
cuuuguuguuuucucucuu

SEQ ID NO: 2293 - RNA, 19 nt, Artificial Sequence
  Description of Artificial Sequence: Synthetic oligonucleotide
acuuuguuguuuucucucu

SEQ ID NO: 2294 - RNA, 19 nt, Artificial Sequence
  Description of Artificial Sequence: Synthetic oligonucleotide
cacuuuguuguuuucucuc

SEQ ID NO: 2295 - RNA, 19 nt, Artificial Sequence
  Description of Artificial Sequence: Synthetic oligonucleotide
ccacuuuguuguuuucucu

SEQ ID NO: 2296 - RNA, 19 nt, Artificial Sequence
  Description of Artificial Sequence: Synthetic oligonucleotide
gccacuuuguuguuuucuc

SEQ ID NO: 2297 - RNA, 19 nt, Artificial Sequence
  Description of Artificial Sequence: Synthetic oligonucleotide
cgccacuuuguuguuuucu

SEQ ID NO: 2298 - RNA, 19 nt, Artificial Sequence
  Description of Artificial Sequence: Synthetic oligonucleotide
ucgccacuuuguuguuuuc

SEQ ID NO: 2299 - RNA, 19 nt, Artificial Sequence
  Description of Artificial Sequence: Synthetic oligonucleotide
cucgccacuuuguuguuuu

SEQ ID NO: 2300 - RNA, 19 nt, Artificial Sequence
  Description of Artificial Sequence: Synthetic oligonucleotide
ccucgccacuuuguuguuu

SEQ ID NO: 2301 - RNA, 19 nt, Artificial Sequence
  Description of Artificial Sequence: Synthetic oligonucleotide
gccucgccacuuuguuguu

SEQ ID NO: 2302 - RNA, 19 nt, Artificial Sequence
  Description of Artificial Sequence: Synthetic oligonucleotide
ggccucgccacuuuguugu

SEQ ID NO: 2303 - RNA, 19 nt, Artificial Sequence
  Description of Artificial Sequence: Synthetic oligonucleotide
gggccucgccacuuuguug

SEQ ID NO: 2304 - RNA, 19 nt, Artificial Sequence
  Description of Artificial Sequence: Synthetic oligonucleotide
agggccucgccacuuuguu

SEQ ID NO: 2305 - RNA, 19 nt, Artificial Sequence
  Description of Artificial Sequence: Synthetic oligonucleotide
gagggccucgccacuuugu

SEQ ID NO: 2306 - RNA, 19 nt, Artificial Sequence
  Description of Artificial Sequence: Synthetic oligonucleotide
ugagggccucgccacuuug

SEQ ID NO: 2307 - RNA, 19 nt, Artificial Sequence
  Description of Artificial Sequence: Synthetic oligonucleotide
cugagggccucgccacuuu

SEQ ID NO: 2308 - RNA, 19 nt, Artificial Sequence
  Description of Artificial Sequence: Synthetic oligonucleotide
ucugagggccucgccacuu

SEQ ID NO: 2309 - RNA, 19 nt, Artificial Sequence
  Description of Artificial Sequence: Synthetic oligonucleotide
cucugagggccucgccacu

SEQ ID NO: 2310 - RNA, 19 nt, Artificial Sequence
  Description of Artificial Sequence: Synthetic oligonucleotide
acucugagggccucgccac

SEQ ID NO: 2311 - RNA, 19 nt, Artificial Sequence
  Description of Artificial Sequence: Synthetic oligonucleotide
cacucugagggccucgcca

SEQ ID NO: 2312 - RNA, 19 nt, Artificial Sequence
  Description of Artificial Sequence: Synthetic oligonucleotide
ucacucugagggccucgcc

SEQ ID NO: 2313 - RNA, 19 nt, Artificial Sequence
  Description of Artificial Sequence: Synthetic oligonucleotide
uucacucugagggccucgc

SEQ ID NO: 2314 - RNA, 19 nt, Artificial Sequence
  Description of Artificial Sequence: Synthetic oligonucleotide
uuucacucugagggccucg

SEQ ID NO: 2315 - RNA, 19 nt, Artificial Sequence
  Description of Artificial Sequence: Synthetic oligonucleotide
cuuucacucugagggccuc

SEQ ID NO: 2316 - RNA, 19 nt, Artificial Sequence
  Description of Artificial Sequence: Synthetic oligonucleotide
gcuuucacucugagggccu

SEQ ID NO: 2317 - RNA, 19 nt, Artificial Sequence
  Description of Artificial Sequence: Synthetic oligonucleotide
cgcuuucacucugagggcc

SEQ ID NO: 2318 - RNA, 19 nt, Artificial Sequence
  Description of Artificial Sequence: Synthetic oligonucleotide
acgcuuucacucugagggc

SEQ ID NO: 2319 - RNA, 19 nt, Artificial Sequence
  Description of Artificial Sequence: Synthetic oligonucleotide
uacgcuuucacucugaggg

SEQ ID NO: 2320 - RNA, 19 nt, Artificial Sequence
  Description of Artificial Sequence: Synthetic oligonucleotide
uuacgcuuucacucugagg

SEQ ID NO: 2321 - RNA, 19 nt, Artificial Sequence
  Description of Artificial Sequence: Synthetic oligonucleotide
cuuacgcuuucacucugag

SEQ ID NO: 2322 - RNA, 19 nt, Artificial Sequence
  Description of Artificial Sequence: Synthetic oligonucleotide
ccuuacgcuuucacucuga

SEQ ID NO: 2323 - RNA, 19 nt, Artificial Sequence
  Description of Artificial Sequence: Synthetic oligonucleotide
accuuacgcuuucacucug

SEQ ID NO: 2324 - RNA, 19 nt, Artificial Sequence
  Description of Artificial Sequence: Synthetic oligonucleotide
aaccuuacgcuuucacucu

SEQ ID NO: 2325 - RNA, 19 nt, Artificial Sequence
  Description of Artificial Sequence: Synthetic oligonucleotide
gaaccuuacgcuuucacuc

SEQ ID NO: 2326 - RNA, 19 nt, Artificial Sequence
  Description of Artificial Sequence: Synthetic oligonucleotide
ugaaccuuacgcuuucacu

SEQ ID NO: 2327 - RNA, 19 nt, Artificial Sequence
  Description of Artificial Sequence: Synthetic oligonucleotide
cugaaccuuacgcuuucac

SEQ ID NO: 2328 - RNA, 19 nt, Artificial Sequence
  Description of Artificial Sequence: Synthetic oligonucleotide
acugaaccuuacgcuuuca

SEQ ID NO: 2329 - RNA, 19 nt, Artificial Sequence
  Description of Artificial Sequence: Synthetic oligonucleotide
gacugaaccuuacgcuuuc

SEQ ID NO: 2330 - RNA, 19 nt, Artificial Sequence
  Description of Artificial Sequence: Synthetic oligonucleotide
ugacugaaccuuacgcuuu

SEQ ID NO: 2331 - RNA, 19 nt, Artificial Sequence
  Description of Artificial Sequence: Synthetic oligonucleotide
cugacugaaccuuacgcuu

SEQ ID NO: 2332 - RNA, 19 nt, Artificial Sequence
  Description of Artificial Sequence: Synthetic oligonucleotide
gcugacugaaccuuacgcu

SEQ ID NO: 2333 - RNA, 19 nt, Artificial Sequence
  Description of Artificial Sequence: Synthetic oligonucleotide
ggcugacugaaccuuacgc

SEQ ID NO: 2334 - RNA, 19 nt, Artificial Sequence
  Description of Artificial Sequence: Synthetic oligonucleotide
aggcugacugaaccuuacg

SEQ ID NO: 2335 - RNA, 19 nt, Artificial Sequence
  Description of Artificial Sequence: Synthetic oligonucleotide
caggcugacugaaccuuac

SEQ ID NO: 2336 - RNA, 19 nt, Artificial Sequence
  Description of Artificial Sequence: Synthetic oligonucleotide
gcaggcugacugaaccuua

SEQ ID NO: 2337 - RNA, 19 nt, Artificial Sequence
  Description of Artificial Sequence: Synthetic oligonucleotide
agcaggcugacugaaccuu

SEQ ID NO: 2338 - RNA, 19 nt, Artificial Sequence
  Description of Artificial Sequence: Synthetic oligonucleotide
cagcaggcugacugaaccu

SEQ ID NO: 2339 - RNA, 19 nt, Artificial Sequence
  Description of Artificial Sequence: Synthetic oligonucleotide
gcagcaggcugacugaacc

SEQ ID NO: 2340 - RNA, 19 nt, Artificial Sequence
  Description of Artificial Sequence: Synthetic oligonucleotide
ugcagcaggcugacugaac

SEQ ID NO: 2341 - RNA, 19 nt, Artificial Sequence
  Description of Artificial Sequence: Synthetic oligonucleotide
cugcagcaggcugacugaa

SEQ ID NO: 2342 - RNA, 19 nt, Artificial Sequence
  Description of Artificial Sequence: Synthetic oligonucleotide
gcugcagcaggcugacuga

SEQ ID NO: 2343 - RNA, 19 nt, Artificial Sequence
  Description of Artificial Sequence: Synthetic oligonucleotide
agcugcagcaggcugacug

SEQ ID NO: 2344 - RNA, 19 nt, Artificial Sequence
  Description of Artificial Sequence: Synthetic oligonucleotide
aagcugcagcaggcugacu

SEQ ID NO: 2345 - RNA, 19 nt, Artificial Sequence
  Description of Artificial Sequence: Synthetic oligonucleotide
aaagcugcagcaggcugac

SEQ ID NO: 2346 - RNA, 19 nt, Artificial Sequence
  Description of Artificial Sequence: Synthetic oligonucleotide
caaagcugcagcaggcuga

SEQ ID NO: 2347 - RNA, 19 nt, Artificial Sequence
  Description of Artificial Sequence: Synthetic oligonucleotide
gcaaagcugcagcaggcug

SEQ ID NO: 2348 - RNA, 19 nt, Artificial Sequence
  Description of Artificial Sequence: Synthetic oligonucleotide
ugcaaagcugcagcaggcu

SEQ ID NO: 2349 - RNA, 19 nt, Artificial Sequence
  Description of Artificial Sequence: Synthetic oligonucleotide
cugcaaagcugcagcaggc

SEQ ID NO: 2350 - RNA, 19 nt, Artificial Sequence
  Description of Artificial Sequence: Synthetic oligonucleotide
ucugcaaagcugcagcagg

SEQ ID NO: 2351 - RNA, 19 nt, Artificial Sequence
  Description of Artificial Sequence: Synthetic oligonucleotide
gucugcaaagcugcagcag

SEQ ID NO: 2352 - RNA, 19 nt, Artificial Sequence
  Description of Artificial Sequence: Synthetic oligonucleotide
ggucugcaaagcugcagca

SEQ ID NO: 2353 - RNA, 19 nt, Artificial Sequence
  Description of Artificial Sequence: Synthetic oligonucleotide
aggucugcaaagcugcagc

SEQ ID NO: 2354 - RNA, 19 nt, Artificial Sequence
  Description of Artificial Sequence: Synthetic oligonucleotide
gaggucugcaaagcugcag

SEQ ID NO: 2355 - RNA, 19 nt, Artificial Sequence
  Description of Artificial Sequence: Synthetic oligonucleotide
ugaggucugcaaagcugca

SEQ ID NO: 2356 - RNA, 19 nt, Artificial Sequence
  Description of Artificial Sequence: Synthetic oligonucleotide
cugaggucugcaaagcugc

SEQ ID NO: 2357 - RNA, 19 nt, Artificial Sequence
  Description of Artificial Sequence: Synthetic oligonucleotide
gcugaggucugcaaagcug

SEQ ID NO: 2358 - RNA, 19 nt, Artificial Sequence
  Description of Artificial Sequence: Synthetic oligonucleotide
agcugaggucugcaaagcu

SEQ ID NO: 2359 - RNA, 19 nt, Artificial Sequence
  Description of Artificial Sequence: Synthetic oligonucleotide
cagcugaggucugcaaagc

SEQ ID NO: 2360 - RNA, 19 nt, Artificial Sequence
  Description of Artificial Sequence: Synthetic oligonucleotide
ccagcugaggucugcaaag

SEQ ID NO: 2361 - RNA, 19 nt, Artificial Sequence
  Description of Artificial Sequence: Synthetic oligonucleotide
cccagcugaggucugcaaa

SEQ ID NO: 2362 - RNA, 19 nt, Artificial Sequence
  Description of Artificial Sequence: Synthetic oligonucleotide
gcccagcugaggucugcaa

SEQ ID NO: 2363 - RNA, 19 nt, Artificial Sequence
  Description of Artificial Sequence: Synthetic oligonucleotide
ugcccagcugaggucugca

SEQ ID NO: 2364 - RNA, 19 nt, Artificial Sequence
  Description of Artificial Sequence: Synthetic oligonucleotide
augcccagcugaggucugc

SEQ ID NO: 2365 - RNA, 19 nt, Artificial Sequence
  Description of Artificial Sequence: Synthetic oligonucleotide
gaugcccagcugaggucug

SEQ ID NO: 2366 - RNA, 19 nt, Artificial Sequence
  Description of Artificial Sequence: Synthetic oligonucleotide
agaugcccagcugaggucu

SEQ ID NO: 2367 - RNA, 19 nt, Artificial Sequence
  Description of Artificial Sequence: Synthetic oligonucleotide
gagaugcccagcugagguc

SEQ ID NO: 2368 - RNA, 19 nt, Artificial Sequence
  Description of Artificial Sequence: Synthetic oligonucleotide
ggagaugcccagcugaggu

SEQ ID NO: 2369 - RNA, 19 nt, Artificial Sequence
  Description of Artificial Sequence: Synthetic oligonucleotide
uggagaugcccagcugagg

SEQ ID NO: 2370 - RNA, 19 nt, Artificial Sequence
  Description of Artificial Sequence: Synthetic oligonucleotide
cuggagaugcccagcugag

SEQ ID NO: 2371 - RNA, 19 nt, Artificial Sequence
  Description of Artificial Sequence: Synthetic oligonucleotide
ucuggagaugcccagcuga

SEQ ID NO: 2372 - RNA, 19 nt, Artificial Sequence
  Description of Artificial Sequence: Synthetic oligonucleotide
gucuggagaugcccagcug

SEQ ID NO: 2373 - RNA, 19 nt, Artificial Sequence
  Description of Artificial Sequence: Synthetic oligonucleotide
agucuggagaugcccagcu

SEQ ID NO: 2374 - RNA, 19 nt, Artificial Sequence
  Description of Artificial Sequence: Synthetic oligonucleotide
gagucuggagaugcccagc

SEQ ID NO: 2375 - RNA, 19 nt, Artificial Sequence
  Description of Artificial Sequence: Synthetic oligonucleotide
ggagucuggagaugcccag

SEQ ID NO: 2376 - RNA, 19 nt, Artificial Sequence
  Description of Artificial Sequence: Synthetic oligonucleotide
gggagucuggagaugccca

SEQ ID NO: 2377 - RNA, 19 nt, Artificial Sequence
  Description of Artificial Sequence: Synthetic oligonucleotide
ggggagucuggagaugccc

SEQ ID NO: 2378 - RNA, 19 nt, Artificial Sequence
  Description of Artificial Sequence: Synthetic oligonucleotide
aggggagucuggagaugcc

SEQ ID NO: 2379 - RNA, 19 nt, Artificial Sequence
  Description of Artificial Sequence: Synthetic oligonucleotide
caggggagucuggagaugc

SEQ ID NO: 2380 - RNA, 19 nt, Artificial Sequence
  Description of Artificial Sequence: Synthetic oligonucleotide
ucaggggagucuggagaug

SEQ ID NO: 2381 - RNA, 19 nt, Artificial Sequence
  Description of Artificial Sequence: Synthetic oligonucleotide
uucaggggagucuggagau

SEQ ID NO: 2382 - RNA, 19 nt, Artificial Sequence
  Description of Artificial Sequence: Synthetic oligonucleotide
cuucaggggagucuggaga

SEQ ID NO: 2383 - RNA, 19 nt, Artificial Sequence
  Description of Artificial Sequence: Synthetic oligonucleotide
ccuucaggggagucuggag

SEQ ID NO: 2384 - RNA, 19 nt, Artificial Sequence
  Description of Artificial Sequence: Synthetic oligonucleotide
uccuucaggggagucugga

SEQ ID NO: 2385 - RNA, 19 nt, Artificial Sequence
  Description of Artificial Sequence: Synthetic oligonucleotide
uuccuucaggggagucugg

SEQ ID NO: 2386 - RNA, 19 nt, Artificial Sequence
  Description of Artificial Sequence: Synthetic oligonucleotide
cuuccuucaggggagucug

SEQ ID NO: 2387 - RNA, 19 nt, Artificial Sequence
  Description of Artificial Sequence: Synthetic oligonucleotide
ucuuccuucaggggagucu

SEQ ID NO: 2388 - RNA, 19 nt, Artificial Sequence
  Description of Artificial Sequence: Synthetic oligonucleotide
cucuuccuucaggggaguc

SEQ ID NO: 2389 - RNA, 19 nt, Artificial Sequence
  Description of Artificial Sequence: Synthetic oligonucleotide
gcucuuccuucaggggagu

SEQ ID NO: 2390 - RNA, 19 nt, Artificial Sequence
  Description of Artificial Sequence: Synthetic oligonucleotide
ggcucuuccuucaggggag

SEQ ID NO: 2391 - RNA, 19 nt, Artificial Sequence
  Description of Artificial Sequence: Synthetic oligonucleotide
aggcucuuccuucagggga

SEQ ID NO: 2392 - RNA, 19 nt, Artificial Sequence
  Description of Artificial Sequence: Synthetic oligonucleotide
aaggcucuuccuucagggg

SEQ ID NO: 2393 - RNA, 19 nt, Artificial Sequence
  Description of Artificial Sequence: Synthetic oligonucleotide
gaaggcucuuccuucaggg

SEQ ID NO: 2394 - RNA, 19 nt, Artificial Sequence
  Description of Artificial Sequence: Synthetic oligonucleotide
ggaaggcucuuccuucagg

SEQ ID NO: 2395 - RNA, 19 nt, Artificial Sequence
  Description of Artificial Sequence: Synthetic oligonucleotide
aggaaggcucuuccuucag

SEQ ID NO: 2396 - RNA, 19 nt, Artificial Sequence
  Description of Artificial Sequence: Synthetic oligonucleotide
gaggaaggcucuuccuuca

SEQ ID NO: 2397 - RNA, 19 nt, Artificial Sequence
  Description of Artificial Sequence: Synthetic oligonucleotide
ugaggaaggcucuuccuuc

SEQ ID NO: 2398 - RNA, 19 nt, Artificial Sequence
  Description of Artificial Sequence: Synthetic oligonucleotide
gugaggaaggcucuuccuu

SEQ ID NO: 2399 - RNA, 19 nt, Artificial Sequence
  Description of Artificial Sequence: Synthetic oligonucleotide
ggugaggaaggcucuuccu

SEQ ID NO: 2400 - RNA, 19 nt, Artificial Sequence
  Description of Artificial Sequence: Synthetic oligonucleotide
gggugaggaaggcucuucc

SEQ ID NO: 2401 - RNA, 19 nt, Artificial Sequence
  Description of Artificial Sequence: Synthetic oligonucleotide
ugggugaggaaggcucuuc

SEQ ID NO: 2402 - RNA, 19 nt, Artificial Sequence
  Description of Artificial Sequence: Synthetic oligonucleotide
uugggugaggaaggcucuu

SEQ ID NO: 2403 - RNA, 19 nt, Artificial Sequence
  Description of Artificial Sequence: Synthetic oligonucleotide
uuugggugaggaaggcucu

SEQ ID NO: 2404 - RNA, 19 nt, Artificial Sequence
  Description of Artificial Sequence: Synthetic oligonucleotide
guuugggugaggaaggcuc

SEQ ID NO: 2405 - RNA, 19 nt, Artificial Sequence
  Description of Artificial Sequence: Synthetic oligonucleotide
gguuugggugaggaaggcu

SEQ ID NO: 2406 - RNA, 19 nt, Artificial Sequence
  Description of Artificial Sequence: Synthetic oligonucleotide
ggguuugggugaggaaggc

SEQ ID NO: 2407 - RNA, 19 nt, Artificial Sequence
  Description of Artificial Sequence: Synthetic oligonucleotide
uggguuugggugaggaagg

SEQ ID NO: 2408 - RNA, 19 nt, Artificial Sequence
  Description of Artificial Sequence: Synthetic oligonucleotide
guggguuugggugaggaag

SEQ ID NO: 2409 - RNA, 19 nt, Artificial Sequence
  Description of Artificial Sequence: Synthetic oligonucleotide
uguggguuugggugaggaa

SEQ ID NO: 2410 - RNA, 19 nt, Artificial Sequence
  Description of Artificial Sequence: Synthetic oligonucleotide
uuguggguuugggugagga

SEQ ID NO: 2411 - RNA, 19 nt, Artificial Sequence
  Description of Artificial Sequence: Synthetic oligonucleotide
uuuguggguuugggugagg

SEQ ID NO: 2412 - RNA, 19 nt, Artificial Sequence
  Description of Artificial Sequence: Synthetic oligonucleotide
uuuuguggguuugggugag

SEQ ID NO: 2413 - RNA, 19 nt, Artificial Sequence
  Description of Artificial Sequence: Synthetic oligonucleotide
cuuuuguggguuuggguga

SEQ ID NO: 2414 - RNA, 19 nt, Artificial Sequence
  Description of Artificial Sequence: Synthetic oligonucleotide
ucuuuuguggguuugggug

SEQ ID NO: 2415 - RNA, 19 nt, Artificial Sequence
  Description of Artificial Sequence: Synthetic oligonucleotide
aucuuuuguggguuugggu

SEQ ID NO: 2416 - RNA, 19 nt, Artificial Sequence
  Description of Artificial Sequence: Synthetic oligonucleotide
caucuuuuguggguuuggg

SEQ ID NO: 2417 - RNA, 19 nt, Artificial Sequence
  Description of Artificial Sequence: Synthetic oligonucleotide
gcaucuuuuguggguuugg

SEQ ID NO: 2418 - RNA, 19 nt, Artificial Sequence
  Description of Artificial Sequence: Synthetic oligonucleotide
agcaucuuuuguggguuug

SEQ ID NO: 2419 - RNA, 19 nt, Artificial Sequence
  Description of Artificial Sequence: Synthetic oligonucleotide
cagcaucuuuuguggguuu

SEQ ID NO: 2420 - RNA, 19 nt, Artificial Sequence
  Description of Artificial Sequence: Synthetic oligonucleotide
ucagcaucuuuuguggguu

SEQ ID NO: 2421 - RNA, 19 nt, Artificial Sequence
  Description of Artificial Sequence: Synthetic oligonucleotide
uucagcaucuuuugugggu

SEQ ID NO: 2422 - RNA, 19 nt, Artificial Sequence
  Description of Artificial Sequence: Synthetic oligonucleotide
uuucagcaucuuuuguggg

SEQ ID NO: 2423 - RNA, 19 nt, Artificial Sequence
  Description of Artificial Sequence: Synthetic oligonucleotide
uuuucagcaucuuuugugg

SEQ ID NO: 2424 - RNA, 19 nt, Artificial Sequence
  Description of Artificial Sequence: Synthetic oligonucleotide
uuuuucagcaucuuuugug

SEQ ID NO: 2425 - RNA, 19 nt, Artificial Sequence
  Description of Artificial Sequence: Synthetic oligonucleotide
cuuuuucagcaucuuuugu

SEQ ID NO: 2426 - RNA, 19 nt, Artificial Sequence
  Description of Artificial Sequence: Synthetic oligonucleotide
gcuuuuucagcaucuuuug

SEQ ID NO: 2427 - RNA, 19 nt, Artificial Sequence
  Description of Artificial Sequence: Synthetic oligonucleotide
ggcuuuuucagcaucuuuu

SEQ ID NO: 2428 - RNA, 19 nt, Artificial Sequence
  Description of Artificial Sequence: Synthetic oligonucleotide
aggcuuuuucagcaucuuu

SEQ ID NO: 2429 - RNA, 19 nt, Artificial Sequence
  Description of Artificial Sequence: Synthetic oligonucleotide
gaggcuuuuucagcaucuu

SEQ ID NO: 2430 - RNA, 19 nt, Artificial Sequence
  Description of Artificial Sequence: Synthetic oligonucleotide
agaggcuuuuucagcaucu

SEQ ID NO: 2431 - RNA, 19 nt, Artificial Sequence
  Description of Artificial Sequence: Synthetic oligonucleotide
gagaggcuuuuucagcauc

SEQ ID NO: 2432 - RNA, 19 nt, Artificial Sequence
  Description of Artificial Sequence: Synthetic oligonucleotide
agagaggcuuuuucagcau

SEQ ID NO: 2433 - RNA, 19 nt, Artificial Sequence
  Description of Artificial Sequence: Synthetic oligonucleotide
gagagaggcuuuuucagca

SEQ ID NO: 2434 - RNA, 19 nt, Artificial Sequence
  Description of Artificial Sequence: Synthetic oligonucleotide
ugagagaggcuuuuucagc

SEQ ID NO: 2435 - RNA, 19 nt, Artificial Sequence
  Description of Artificial Sequence: Synthetic oligonucleotide
cugagagaggcuuuuucag

SEQ ID NO: 2436 - RNA, 19 nt, Artificial Sequence
  Description of Artificial Sequence: Synthetic oligonucleotide
gcugagagaggcuuuuuca

SEQ ID NO: 2437 - RNA, 19 nt, Artificial Sequence
  Description of Artificial Sequence: Synthetic oligonucleotide
agcugagagaggcuuuuuc

SEQ ID NO: 2438 - RNA, 19 nt, Artificial Sequence
  Description of Artificial Sequence: Synthetic oligonucleotide
cagcugagagaggcuuuuu

SEQ ID NO: 2439 - RNA, 19 nt, Artificial Sequence
  Description of Artificial Sequence: Synthetic oligonucleotide
acagcugagagaggcuuuu

SEQ ID NO: 2440 - RNA, 19 nt, Artificial Sequence
  Description of Artificial Sequence: Synthetic oligonucleotide
cacagcugagagaggcuuu

SEQ ID NO: 2441 - RNA, 19 nt, Artificial Sequence
  Description of Artificial Sequence: Synthetic oligonucleotide
ucacagcugagagaggcuu

SEQ ID NO: 2442 - RNA, 19 nt, Artificial Sequence
  Description of Artificial Sequence: Synthetic oligonucleotide
gucacagcugagagaggcu

SEQ ID NO: 2443 - RNA, 19 nt, Artificial Sequence
  Description of Artificial Sequence: Synthetic oligonucleotide
ggucacagcugagagaggc

SEQ ID NO: 2444 - RNA, 19 nt, Artificial Sequence
  Description of Artificial Sequence: Synthetic oligonucleotide
aggucacagcugagagagg

SEQ ID NO: 2445 - RNA, 19 nt, Artificial Sequence
  Description of Artificial Sequence: Synthetic oligonucleotide
caggucacagcugagagag

SEQ ID NO: 2446 - RNA, 19 nt, Artificial Sequence
  Description of Artificial Sequence: Synthetic oligonucleotide
ccaggucacagcugagaga

SEQ ID NO: 2447 - RNA, 19 nt, Artificial Sequence
  Description of Artificial Sequence: Synthetic oligonucleotide
gccaggucacagcugagag

SEQ ID NO: 2448 - RNA, 19 nt, Artificial Sequence
  Description of Artificial Sequence: Synthetic oligonucleotide
agccaggucacagcugaga

SEQ ID NO: 2449 - RNA, 19 nt, Artificial Sequence
  Description of Artificial Sequence: Synthetic oligonucleotide
gagccaggucacagcugag

SEQ ID NO: 2450 - RNA, 19 nt, Artificial Sequence
  Description of Artificial Sequence: Synthetic oligonucleotide
agagccaggucacagcuga

SEQ ID NO: 2451 - RNA, 19 nt, Artificial Sequence
  Description of Artificial Sequence: Synthetic oligonucleotide
cagagccaggucacagcug

SEQ ID NO: 2452 - RNA, 19 nt, Artificial Sequence
  Description of Artificial Sequence: Synthetic oligonucleotide
gcagagccaggucacagcu

SEQ ID NO: 2453 - RNA, 19 nt, Artificial Sequence
  Description of Artificial Sequence: Synthetic oligonucleotide
ugcagagccaggucacagc

SEQ ID NO: 2454 - RNA, 19 nt, Artificial Sequence
  Description of Artificial Sequence: Synthetic oligonucleotide
augcagagccaggucacag

SEQ ID NO: 2455 - RNA, 19 nt, Artificial Sequence
  Description of Artificial Sequence: Synthetic oligonucleotide
aaugcagagccaggucaca

SEQ ID NO: 2456 - RNA, 19 nt, Artificial Sequence
  Description of Artificial Sequence: Synthetic oligonucleotide
aaaugcagagccaggucac

SEQ ID NO: 2457 - RNA, 19 nt, Artificial Sequence
  Description of Artificial Sequence: Synthetic oligonucleotide
aaaaugcagagccagguca

SEQ ID NO: 2458 - RNA, 19 nt, Artificial Sequence
  Description of Artificial Sequence: Synthetic oligonucleotide
gaaaaugcagagccagguc

SEQ ID NO: 2459 - RNA, 19 nt, Artificial Sequence
  Description of Artificial Sequence: Synthetic oligonucleotide
ugaaaaugcagagccaggu

SEQ ID NO: 2460 - RNA, 19 nt, Artificial Sequence
  Description of Artificial Sequence: Synthetic oligonucleotide
augaaaaugcagagccagg

SEQ ID NO: 2461 - RNA, 19 nt, Artificial Sequence
  Description of Artificial Sequence: Synthetic oligonucleotide
gaugaaaaugcagagccag

SEQ ID NO: 2462 - RNA, 19 nt, Artificial Sequence
  Description of Artificial Sequence: Synthetic oligonucleotide
cgaugaaaaugcagagcca

SEQ ID NO: 2463 - RNA, 19 nt, Artificial Sequence
  Description of Artificial Sequence: Synthetic oligonucleotide
acgaugaaaaugcagagcc

SEQ ID NO: 2464 - RNA, 19 nt, Artificial Sequence
  Description of Artificial Sequence: Synthetic oligonucleotide
cacgaugaaaaugcagagc

SEQ ID NO: 2465 - RNA, 19 nt, Artificial Sequence
  Description of Artificial Sequence: Synthetic oligonucleotide
ccacgaugaaaaugcagag

SEQ ID NO: 2466 - RNA, 19 nt, Artificial Sequence
  Description of Artificial Sequence: Synthetic oligonucleotide
gccacgaugaaaaugcaga

SEQ ID NO: 2467 - RNA, 19 nt, Artificial Sequence
  Description of Artificial Sequence: Synthetic oligonucleotide
ggccacgaugaaaaugcag

SEQ ID NO: 2468 - RNA, 19 nt, Artificial Sequence
  Description of Artificial Sequence: Synthetic oligonucleotide
aggccacgaugaaaaugca

SEQ ID NO: 2469 - RNA, 19 nt, Artificial Sequence
  Description of Artificial Sequence: Synthetic oligonucleotide
aaggccacgaugaaaaugc

SEQ ID NO: 2470 - RNA, 19 nt, Artificial Sequence
  Description of Artificial Sequence: Synthetic oligonucleotide
aaaggccacgaugaaaaug

SEQ ID NO: 2471 - RNA, 19 nt, Artificial Sequence
  Description of Artificial Sequence: Synthetic oligonucleotide
caaaggccacgaugaaaau

SEQ ID NO: 2472 - RNA, 19 nt, Artificial Sequence
  Description of Artificial Sequence: Synthetic oligonucleotide
acaaaggccacgaugaaaa

SEQ ID NO: 2473 - RNA, 19 nt, Artificial Sequence
  Description of Artificial Sequence: Synthetic oligonucleotide
gacaaaggccacgaugaaa

SEQ ID NO: 2474 - RNA, 19 nt, Artificial Sequence
  Description of Artificial Sequence: Synthetic oligonucleotide
ugacaaaggccacgaugaa

SEQ ID NO: 2475 - RNA, 19 nt, Artificial Sequence
  Description of Artificial Sequence: Synthetic oligonucleotide
cugacaaaggccacgauga

SEQ ID NO: 2476 - RNA, 19 nt, Artificial Sequence
  Description of Artificial Sequence: Synthetic oligonucleotide
gcugacaaaggccacgaug

SEQ ID NO: 2477 - RNA, 19 nt, Artificial Sequence
  Description of Artificial Sequence: Synthetic oligonucleotide
ggcugacaaaggccacgau

SEQ ID NO: 2478 - RNA, 19 nt, Artificial Sequence
  Description of Artificial Sequence: Synthetic oligonucleotide
uggcugacaaaggccacga

SEQ ID NO: 2479 - RNA, 19 nt, Artificial Sequence
  Description of Artificial Sequence: Synthetic oligonucleotide
guggcugacaaaggccacg

SEQ ID NO: 2480 - RNA, 19 nt, Artificial Sequence
  Description of Artificial Sequence: Synthetic oligonucleotide
gguggcugacaaaggccac

SEQ ID NO: 2481 - RNA, 19 nt, Artificial Sequence
  Description of Artificial Sequence: Synthetic oligonucleotide
ggguggcugacaaaggcca

SEQ ID NO: 2482 - RNA, 19 nt, Artificial Sequence
  Description of Artificial Sequence: Synthetic oligonucleotide
uggguggcugacaaaggcc

SEQ ID NO: 2483 - RNA, 19 nt, Artificial Sequence
  Description of Artificial Sequence: Synthetic oligonucleotide
cuggguggcugacaaaggc

SEQ ID NO: 2484 - RNA, 19 nt, Artificial Sequence
  Description of Artificial Sequence: Synthetic oligonucleotide
gcuggguggcugacaaagg

SEQ ID NO: 2485 - RNA, 19 nt, Artificial Sequence
  Description of Artificial Sequence: Synthetic oligonucleotide
cgcuggguggcugacaaag

SEQ ID NO: 2486 - RNA, 19 nt, Artificial Sequence
  Description of Artificial Sequence: Synthetic oligonucleotide
acgcuggguggcugacaaa

SEQ ID NO: 2487 - RNA, 19 nt, Artificial Sequence
  Description of Artificial Sequence: Synthetic oligonucleotide
cacgcuggguggcugacaa

SEQ ID NO: 2488 - RNA, 19 nt, Artificial Sequence
  Description of Artificial Sequence: Synthetic oligonucleotide
ccacgcuggguggcugaca

SEQ ID NO: 2489 - RNA, 19 nt, Artificial Sequence
  Description of Artificial Sequence: Synthetic oligonucleotide
gccacgcuggguggcugac

SEQ ID NO: 2490 - RNA, 19 nt, Artificial Sequence
  Description of Artificial Sequence: Synthetic oligonucleotide
agccacgcuggguggcuga

SEQ ID NO: 2491 - RNA, 19 nt, Artificial Sequence
  Description of Artificial Sequence: Synthetic oligonucleotide
cagccacgcuggguggcug

SEQ ID NO: 2492 - RNA, 19 nt, Artificial Sequence
  Description of Artificial Sequence: Synthetic oligonucleotide
gcagccacgcuggguggcu

SEQ ID NO: 2493 - RNA, 19 nt, Artificial Sequence
  Description of Artificial Sequence: Synthetic oligonucleotide
ugcagccacgcuggguggc

SEQ ID NO: 2494 - RNA, 19 nt, Artificial Sequence
  Description of Artificial Sequence: Synthetic oligonucleotide
cugcagccacgcugggugg

SEQ ID NO: 2495 - RNA, 19 nt, Artificial Sequence
  Description of Artificial Sequence: Synthetic oligonucleotide
ucugcagccacgcugggug

SEQ ID NO: 2496 - RNA, 19 nt, Artificial Sequence
  Description of Artificial Sequence: Synthetic oligonucleotide
uucugcagccacgcugggu

SEQ ID NO: 2497 - RNA, 19 nt, Artificial Sequence
  Description of Artificial Sequence: Synthetic oligonucleotide
cuucugcagccacgcuggg

SEQ ID NO: 2498 - RNA, 19 nt, Artificial Sequence
  Description of Artificial Sequence: Synthetic oligonucleotide
gcuucugcagccacgcugg

SEQ ID NO: 2499 - RNA, 19 nt, Artificial Sequence
  Description of Artificial Sequence: Synthetic oligonucleotide
agcuucugcagccacgcug

SEQ ID NO: 2500 - RNA, 19 nt, Artificial Sequence
  Description of Artificial Sequence: Synthetic oligonucleotide
gagcuucugcagccacgcu

SEQ ID NO: 2501 - RNA, 19 nt, Artificial Sequence
  Description of Artificial Sequence: Synthetic oligonucleotide
agagcuucugcagccacgc

SEQ ID NO: 2502 - RNA, 19 nt, Artificial Sequence
  Description of Artificial Sequence: Synthetic oligonucleotide
gagagcuucugcagccacg

SEQ ID NO: 2503 - RNA, 19 nt, Artificial Sequence
  Description of Artificial Sequence: Synthetic oligonucleotide
agagagcuucugcagccac

SEQ ID NO: 2504 - RNA, 19 nt, Artificial Sequence
  Description of Artificial Sequence: Synthetic oligonucleotide
uagagagcuucugcagcca

SEQ ID NO: 2505 - RNA, 19 nt, Artificial Sequence
  Description of Artificial Sequence: Synthetic oligonucleotide
uuagagagcuucugcagcc

SEQ ID NO: 2506 - RNA, 19 nt, Artificial Sequence
  Description of Artificial Sequence: Synthetic oligonucleotide
cuuagagagcuucugcagc

SEQ ID NO: 2507 - RNA, 19 nt, Artificial Sequence
  Description of Artificial Sequence: Synthetic oligonucleotide
gcuuagagagcuucugcag

SEQ ID NO: 2508 - RNA, 19 nt, Artificial Sequence
  Description of Artificial Sequence: Synthetic oligonucleotide
ugcuuagagagcuucugca

SEQ ID NO: 2509 - RNA, 19 nt, Artificial Sequence
  Description of Artificial Sequence: Synthetic oligonucleotide
gugcuuagagagcuucugc

SEQ ID NO: 2510 - RNA, 19 nt, Artificial Sequence
  Description of Artificial Sequence: Synthetic oligonucleotide
ugugcuuagagagcuucug

SEQ ID NO: 2511 - RNA, 19 nt, Artificial Sequence
  Description of Artificial Sequence: Synthetic oligonucleotide
uugugcuuagagagcuucu

SEQ ID NO: 2512 - RNA, 19 nt, Artificial Sequence
  Description of Artificial Sequence: Synthetic oligonucleotide
cuugugcuuagagagcuuc

SEQ ID NO: 2513 - RNA, 19 nt, Artificial Sequence
  Description of Artificial Sequence: Synthetic oligonucleotide
ucuugugcuuagagagcuu

SEQ ID NO: 2514 - RNA, 19 nt, Artificial Sequence
  Description of Artificial Sequence: Synthetic oligonucleotide
gucuugugcuuagagagcu

SEQ ID NO: 2515 - RNA, 19 nt, Artificial Sequence
  Description of Artificial Sequence: Synthetic oligonucleotide
ugucuugugcuuagagagc

SEQ ID NO: 2516 - RNA, 19 nt, Artificial Sequence
  Description of Artificial Sequence: Synthetic oligonucleotide
gugucuugugcuuagagag

SEQ ID NO: 2517 - RNA, 19 nt, Artificial Sequence
  Description of Artificial Sequence: Synthetic oligonucleotide
ggugucuugugcuuagaga

SEQ ID NO: 2518 - RNA, 19 nt, Artificial Sequence
  Description of Artificial Sequence: Synthetic oligonucleotide
uggugucuugugcuuagag

SEQ ID NO: 2519 - RNA, 19 nt, Artificial Sequence
  Description of Artificial Sequence: Synthetic oligonucleotide
cuggugucuugugcuuaga

SEQ ID NO: 2520 - RNA, 19 nt, Artificial Sequence
  Description of Artificial Sequence: Synthetic oligonucleotide
gcuggugucuugugcuuag

SEQ ID NO: 2521 - RNA, 19 nt, Artificial Sequence
  Description of Artificial Sequence: Synthetic oligonucleotide
ugcuggugucuugugcuua

SEQ ID NO: 2522 - RNA, 19 nt, Artificial Sequence
  Description of Artificial Sequence: Synthetic oligonucleotide
gugcuggugucuugugcuu

SEQ ID NO: 2523 - RNA, 19 nt, Artificial Sequence
  Description of Artificial Sequence: Synthetic oligonucleotide
ugugcuggugucuugugcu

SEQ ID NO: 2524 - RNA, 19 nt, Artificial Sequence
  Description of Artificial Sequence: Synthetic oligonucleotide
cugugcuggugucuugugc

SEQ ID NO: 2525 - RNA, 19 nt, Artificial Sequence
  Description of Artificial Sequence: Synthetic oligonucleotide
gcugugcuggugucuugug

SEQ ID NO: 2526 - RNA, 19 nt, Artificial Sequence
  Description of Artificial Sequence: Synthetic oligonucleotide
ggcugugcuggugucuugu

SEQ ID NO: 2527 - RNA, 19 nt, Artificial Sequence
  Description of Artificial Sequence: Synthetic oligonucleotide
uggcugugcuggugucuug

SEQ ID NO: 2528 - RNA, 19 nt, Artificial Sequence
  Description of Artificial Sequence: Synthetic oligonucleotide
guggcugugcuggugucuu

SEQ ID NO: 2529 - RNA, 19 nt, Artificial Sequence
  Description of Artificial Sequence: Synthetic oligonucleotide
uguggcugugcuggugucu

SEQ ID NO: 2530 - RNA, 19 nt, Artificial Sequence
  Description of Artificial Sequence: Synthetic oligonucleotide
cuguggcugugcugguguc

SEQ ID NO: 2531 - RNA, 19 nt, Artificial Sequence
  Description of Artificial Sequence: Synthetic oligonucleotide
gcuguggcugugcuggugu

SEQ ID NO: 2532 - RNA, 19 nt, Artificial Sequence
  Description of Artificial Sequence: Synthetic oligonucleotide
agcuguggcugugcuggug

SEQ ID NO: 2533 - RNA, 19 nt, Artificial Sequence
  Description of Artificial Sequence: Synthetic oligonucleotide
gagcuguggcugugcuggu

SEQ ID NO: 2534 - RNA, 19 nt, Artificial Sequence
  Description of Artificial Sequence: Synthetic oligonucleotide
ugagcuguggcugugcugg

SEQ ID NO: 2535 - RNA, 19 nt, Artificial Sequence
  Description of Artificial Sequence: Synthetic oligonucleotide
uugagcuguggcugugcug

SEQ ID NO: 2536 - RNA, 19 nt, Artificial Sequence
  Description of Artificial Sequence: Synthetic oligonucleotide
uuugagcuguggcugugcu

SEQ ID NO: 2537 - RNA, 19 nt, Artificial Sequence
  Description of Artificial Sequence: Synthetic oligonucleotide
cuuugagcuguggcugugc

SEQ ID NO: 2538 - RNA, 19 nt, Artificial Sequence
  Description of Artificial Sequence: Synthetic oligonucleotide
gcuuugagcuguggcugug

SEQ ID NO: 2539 - RNA, 19 nt, Artificial Sequence
  Description of Artificial Sequence: Synthetic oligonucleotide
cgcuuugagcuguggcugu

SEQ ID NO: 2540 - RNA, 19 nt, Artificial Sequence
  Description of Artificial Sequence: Synthetic oligonucleotide
ccgcuuugagcuguggcug

SEQ ID NO: 2541 - RNA, 19 nt, Artificial Sequence
  Description of Artificial Sequence: Synthetic oligonucleotide
gccgcuuugagcuguggcu

SEQ ID NO: 2542 - RNA, 19 nt, Artificial Sequence
  Description of Artificial Sequence: Synthetic oligonucleotide
ggccgcuuugagcuguggc

SEQ ID NO: 2543 - RNA, 19 nt, Artificial Sequence
  Description of Artificial Sequence: Synthetic oligonucleotide
uggccgcuuugagcugugg

SEQ ID NO: 2544 - RNA, 19 nt, Artificial Sequence
  Description of Artificial Sequence: Synthetic oligonucleotide
uuggccgcuuugagcugug

SEQ ID NO: 2545 - RNA, 19 nt, Artificial Sequence
  Description of Artificial Sequence: Synthetic oligonucleotide
guuggccgcuuugagcugu

SEQ ID NO: 2546 - RNA, 19 nt, Artificial Sequence
  Description of Artificial Sequence: Synthetic oligonucleotide
aguuggccgcuuugagcug

SEQ ID NO: 2547 - RNA, 19 nt, Artificial Sequence
  Description of Artificial Sequence: Synthetic oligonucleotide
caguuggccgcuuugagcu

SEQ ID NO: 2548 - RNA, 19 nt, Artificial Sequence
  Description of Artificial Sequence: Synthetic oligonucleotide
gcaguuggccgcuuugagc

SEQ ID NO: 2549 - RNA, 19 nt, Artificial Sequence
  Description of Artificial Sequence: Synthetic oligonucleotide
agcaguuggccgcuuugag

SEQ ID NO: 2550 - RNA, 19 nt, Artificial Sequence
  Description of Artificial Sequence: Synthetic oligonucleotide
cagcaguuggccgcuuuga

SEQ ID NO: 2551 - RNA, 19 nt, Artificial Sequence
  Description of Artificial Sequence: Synthetic oligonucleotide
acagcaguuggccgcuuug

SEQ ID NO: 2552 - RNA, 19 nt, Artificial Sequence
  Description of Artificial Sequence: Synthetic oligonucleotide
cacagcaguuggccgcuuu

SEQ ID NO: 2553 - RNA, 19 nt, Artificial Sequence
  Description of Artificial Sequence: Synthetic oligonucleotide
ucacagcaguuggccgcuu

SEQ ID NO: 2554 - RNA, 19 nt, Artificial Sequence
  Description of Artificial Sequence: Synthetic oligonucleotide
cucacagcaguuggccgcu

SEQ ID NO: 2555 - RNA, 19 nt, Artificial Sequence
  Description of Artificial Sequence: Synthetic oligonucleotide
ccucacagcaguuggccgc

SEQ ID NO: 2556 - RNA, 19 nt, Artificial Sequence
  Description of Artificial Sequence: Synthetic oligonucleotide
uccucacagcaguuggccg

SEQ ID NO: 2557 - RNA, 19 nt, Artificial Sequence
  Description of Artificial Sequence: Synthetic oligonucleotide
cuccucacagcaguuggcc

SEQ ID NO: 2558 - RNA, 19 nt, Artificial Sequence
  Description of Artificial Sequence: Synthetic oligonucleotide
ccuccucacagcaguuggc

SEQ ID NO: 2559 - RNA, 19 nt, Artificial Sequence
  Description of Artificial Sequence: Synthetic oligonucleotide
accuccucacagcaguugg

SEQ ID NO: 2560 - RNA, 19 nt, Artificial Sequence
  Description of Artificial Sequence: Synthetic oligonucleotide
caccuccucacagcaguug

SEQ ID NO: 2561 - RNA, 19 nt, Artificial Sequence
  Description of Artificial Sequence: Synthetic oligonucleotide
ucaccuccucacagcaguu

SEQ ID NO: 2562 - RNA, 19 nt, Artificial Sequence
  Description of Artificial Sequence: Synthetic oligonucleotide
uucaccuccucacagcagu

SEQ ID NO: 2563 - RNA, 19 nt, Artificial Sequence
  Description of Artificial Sequence: Synthetic oligonucleotide
cuucaccuccucacagcag

SEQ ID NO: 2564 - RNA, 19 nt, Artificial Sequence
  Description of Artificial Sequence: Synthetic oligonucleotide
ccuucaccuccucacagca

SEQ ID NO: 2565 - RNA, 19 nt, Artificial Sequence
  Description of Artificial Sequence: Synthetic oligonucleotide
uccuucaccuccucacagc

SEQ ID NO: 2566 - RNA, 19 nt, Artificial Sequence
  Description of Artificial Sequence: Synthetic oligonucleotide
cuccuucaccuccucacag

SEQ ID NO: 2567 - RNA, 19 nt, Artificial Sequence
  Description of Artificial Sequence: Synthetic oligonucleotide
gcuccuucaccuccucaca

SEQ ID NO: 2568 - RNA, 19 nt, Artificial Sequence
  Description of Artificial Sequence: Synthetic oligonucleotide
agcuccuucaccuccucac

SEQ ID NO: 2569 - RNA, 19 nt, Artificial Sequence
  Description of Artificial Sequence: Synthetic oligonucleotide
gagcuccuucaccuccuca

SEQ ID NO: 2570 - RNA, 19 nt, Artificial Sequence
  Description of Artificial Sequence: Synthetic oligonucleotide
ugagcuccuucaccuccuc

SEQ ID NO: 2571 - RNA, 19 nt, Artificial Sequence
  Description of Artificial Sequence: Synthetic oligonucleotide
uugagcuccuucaccuccu

SEQ ID NO: 2572 - RNA, 19 nt, Artificial Sequence
  Description of Artificial Sequence: Synthetic oligonucleotide
cuugagcuccuucaccucc

SEQ ID NO: 2573 - RNA, 19 nt, Artificial Sequence
  Description of Artificial Sequence: Synthetic oligonucleotide
ccuugagcuccuucaccuc

SEQ ID NO: 2574 - RNA, 19 nt, Artificial Sequence
  Description of Artificial Sequence: Synthetic oligonucleotide
gccuugagcuccuucaccu

SEQ ID NO: 2575 - RNA, 19 nt, Artificial Sequence
  Description of Artificial Sequence: Synthetic oligonucleotide
ggccuugagcuccuucacc

SEQ ID NO: 2576 - RNA, 19 nt, Artificial Sequence
  Description of Artificial Sequence: Synthetic oligonucleotide
gggccuugagcuccuucac

SEQ ID NO: 2577 - RNA, 19 nt, Artificial Sequence
  Description of Artificial Sequence: Synthetic oligonucleotide
ugggccuugagcuccuuca

SEQ ID NO: 2578 - RNA, 19 nt, Artificial Sequence
  Description of Artificial Sequence: Synthetic oligonucleotide
uugggccuugagcuccuuc

SEQ ID NO: 2579 - RNA, 19 nt, Artificial Sequence
  Description of Artificial Sequence: Synthetic oligonucleotide
cuugggccuugagcuccuu

SEQ ID NO: 2580 - RNA, 19 nt, Artificial Sequence
  Description of Artificial Sequence: Synthetic oligonucleotide
acuugggccuugagcuccu

SEQ ID NO: 2581 - RNA, 19 nt, Artificial Sequence
  Description of Artificial Sequence: Synthetic oligonucleotide
aacuugggccuugagcucc

SEQ ID NO: 2582 - RNA, 19 nt, Artificial Sequence
  Description of Artificial Sequence: Synthetic oligonucleotide
caacuugggccuugagcuc

SEQ ID NO: 2583 - RNA, 19 nt, Artificial Sequence
  Description of Artificial Sequence: Synthetic oligonucleotide
gcaacuugggccuugagcu

SEQ ID NO: 2584 - RNA, 19 nt, Artificial Sequence
  Description of Artificial Sequence: Synthetic oligonucleotide
ggcaacuugggccuugagc

SEQ ID NO: 2585 - RNA, 19 nt, Artificial Sequence
  Description of Artificial Sequence: Synthetic oligonucleotide
uggcaacuugggccuugag

SEQ ID NO: 2586 - RNA, 19 nt, Artificial Sequence
  Description of Artificial Sequence: Synthetic oligonucleotide
uuggcaacuugggccuuga

SEQ ID NO: 2587 - RNA, 19 nt, Artificial Sequence
  Description of Artificial Sequence: Synthetic oligonucleotide
guuggcaacuugggccuug

SEQ ID NO: 2588 - RNA, 19 nt, Artificial Sequence
  Description of Artificial Sequence: Synthetic oligonucleotide
gguuggcaacuugggccuu

SEQ ID NO: 2589 - RNA, 19 nt, Artificial Sequence
  Description of Artificial Sequence: Synthetic oligonucleotide
agguuggcaacuugggccu

SEQ ID NO: 2590 - RNA, 19 nt, Artificial Sequence
  Description of Artificial Sequence: Synthetic oligonucleotide
aagguuggcaacuugggcc

SEQ ID NO: 2591 - RNA, 19 nt, Artificial Sequence
  Description of Artificial Sequence: Synthetic oligonucleotide
uaagguuggcaacuugggc

SEQ ID NO: 2592 - RNA, 19 nt, Artificial Sequence
  Description of Artificial Sequence: Synthetic oligonucleotide
cuaagguuggcaacuuggg

SEQ ID NO: 2593 - RNA, 19 nt, Artificial Sequence
  Description of Artificial Sequence: Synthetic oligonucleotide
gcuaagguuggcaacuugg

SEQ ID NO: 2594 - RNA, 19 nt, Artificial Sequence
  Description of Artificial Sequence: Synthetic oligonucleotide
ugcuaagguuggcaacuug

SEQ ID NO: 2595 - RNA, 19 nt, Artificial Sequence
  Description of Artificial Sequence: Synthetic oligonucleotide
cugcuaagguuggcaacuu

SEQ ID NO: 2596 - RNA, 19 nt, Artificial Sequence
  Description of Artificial Sequence: Synthetic oligonucleotide
gcugcuaagguuggcaacu

SEQ ID NO: 2597 - RNA, 19 nt, Artificial Sequence
  Description of Artificial Sequence: Synthetic oligonucleotide
ggcugcuaagguuggcaac

SEQ ID NO: 2598 - RNA, 19 nt, Artificial Sequence
  Description of Artificial Sequence: Synthetic oligonucleotide
aggcugcuaagguuggcaa

SEQ ID NO: 2599 - RNA, 19 nt, Artificial Sequence
  Description of Artificial Sequence: Synthetic oligonucleotide
caggcugcuaagguuggca

SEQ ID NO: 2600 - RNA, 19 nt, Artificial Sequence
  Description of Artificial Sequence: Synthetic oligonucleotide
gcaggcugcuaagguuggc

SEQ ID NO: 2601 - RNA, 19 nt, Artificial Sequence
  Description of Artificial Sequence: Synthetic oligonucleotide
agcaggcugcuaagguugg

SEQ ID NO: 2602 - RNA, 19 nt, Artificial Sequence
  Description of Artificial Sequence: Synthetic oligonucleotide
cagcaggcugcuaagguug

SEQ ID NO: 2603 - RNA, 19 nt, Artificial Sequence
  Description of Artificial Sequence: Synthetic oligonucleotide
ucagcaggcugcuaagguu

SEQ ID NO: 2604 - RNA, 19 nt, Artificial Sequence
  Description of Artificial Sequence: Synthetic oligonucleotide
cucagcaggcugcuaaggu

SEQ ID NO: 2605 - RNA, 19 nt, Artificial Sequence
  Description of Artificial Sequence: Synthetic oligonucleotide
acucagcaggcugcuaagg

SEQ ID NO: 2606 - RNA, 19 nt, Artificial Sequence
  Description of Artificial Sequence: Synthetic oligonucleotide
cacucagcaggcugcuaag

SEQ ID NO: 2607 - RNA, 19 nt, Artificial Sequence
  Description of Artificial Sequence: Synthetic oligonucleotide
ucacucagcaggcugcuaa

SEQ ID NO: 2608 - RNA, 19 nt, Artificial Sequence
  Description of Artificial Sequence: Synthetic oligonucleotide
uucacucagcaggcugcua

SEQ ID NO: 2609 - RNA, 19 nt, Artificial Sequence
  Description of Artificial Sequence: Synthetic oligonucleotide
guucacucagcaggcugcu

SEQ ID NO: 2610 - RNA, 19 nt, Artificial Sequence
  Description of Artificial Sequence: Synthetic oligonucleotide
aguucacucagcaggcugc

SEQ ID NO: 2611 - RNA, 19 nt, Artificial Sequence
  Description of Artificial Sequence: Synthetic oligonucleotide
caguucacucagcaggcug

SEQ ID NO: 2612 - RNA, 19 nt, Artificial Sequence
  Description of Artificial Sequence: Synthetic oligonucleotide
ucaguucacucagcaggcu

SEQ ID NO: 2613 - RNA, 19 nt, Artificial Sequence
  Description of Artificial Sequence: Synthetic oligonucleotide
uucaguucacucagcaggc

SEQ ID NO: 2614 - RNA, 19 nt, Artificial Sequence
  Description of Artificial Sequence: Synthetic oligonucleotide
guucaguucacucagcagg

SEQ ID NO: 2615 - RNA, 19 nt, Artificial Sequence
  Description of Artificial Sequence: Synthetic oligonucleotide
uguucaguucacucagcag

SEQ ID NO: 2616 - RNA, 19 nt, Artificial Sequence
  Description of Artificial Sequence: Synthetic oligonucleotide
uuguucaguucacucagca

SEQ ID NO: 2617 - RNA, 19 nt, Artificial Sequence
  Description of Artificial Sequence: Synthetic oligonucleotide
cuuguucaguucacucagc

SEQ ID NO: 2618 - RNA, 19 nt, Artificial Sequence
  Description of Artificial Sequence: Synthetic oligonucleotide
ucuuguucaguucacucag

SEQ ID NO: 2619 - RNA, 19 nt, Artificial Sequence
  Description of Artificial Sequence: Synthetic oligonucleotide
uucuuguucaguucacuca

SEQ ID NO: 2620 - RNA, 19 nt, Artificial Sequence
  Description of Artificial Sequence: Synthetic oligonucleotide
cuucuuguucaguucacuc

SEQ ID NO: 2621 - RNA, 19 nt, Artificial Sequence
  Description of Artificial Sequence: Synthetic oligonucleotide
gcuucuuguucaguucacu

SEQ ID NO: 2622 - RNA, 19 nt, Artificial Sequence
  Description of Artificial Sequence: Synthetic oligonucleotide
ugcuucuuguucaguucac

SEQ ID NO: 2623 - RNA, 19 nt, Artificial Sequence
  Description of Artificial Sequence: Synthetic oligonucleotide
cugcuucuuguucaguuca

SEQ ID NO: 2624 - RNA, 19 nt, Artificial Sequence
  Description of Artificial Sequence: Synthetic oligonucleotide
ccugcuucuuguucaguuc

SEQ ID NO: 2625 - RNA, 19 nt, Artificial Sequence
  Description of Artificial Sequence: Synthetic oligonucleotide
uccugcuucuuguucaguu

SEQ ID NO: 2626 - RNA, 19 nt, Artificial Sequence
  Description of Artificial Sequence: Synthetic oligonucleotide
cuccugcuucuuguucagu

SEQ ID NO: 2627 - RNA, 19 nt, Artificial Sequence
  Description of Artificial Sequence: Synthetic oligonucleotide
ucuccugcuucuuguucag

SEQ ID NO: 2628 - RNA, 19 nt, Artificial Sequence
  Description of Artificial Sequence: Synthetic oligonucleotide
cucuccugcuucuuguuca

SEQ ID NO: 2629 - RNA, 19 nt, Artificial Sequence
  Description of Artificial Sequence: Synthetic oligonucleotide
ccucuccugcuucuuguuc

SEQ ID NO: 2630 - RNA, 19 nt, Artificial Sequence
  Description of Artificial Sequence: Synthetic oligonucleotide
cccucuccugcuucuuguu

SEQ ID NO: 2631 - RNA, 19 nt, Artificial Sequence
  Description of Artificial Sequence: Synthetic oligonucleotide
ucccucuccugcuucuugu

SEQ ID NO: 2632 - RNA, 19 nt, Artificial Sequence
  Description of Artificial Sequence: Synthetic oligonucleotide
gucccucuccugcuucuug

SEQ ID NO: 2633 - RNA, 19 nt, Artificial Sequence
  Description of Artificial Sequence: Synthetic oligonucleotide
agucccucuccugcuucuu

SEQ ID NO: 2634 - RNA, 19 nt, Artificial Sequence
  Description of Artificial Sequence: Synthetic oligonucleotide
cagucccucuccugcuucu

SEQ ID NO: 2635 - RNA, 19 nt, Artificial Sequence
  Description of Artificial Sequence: Synthetic oligonucleotide
ccagucccucuccugcuuc

SEQ ID NO: 2636 - RNA, 19 nt, Artificial Sequence
  Description of Artificial Sequence: Synthetic oligonucleotide
cccagucccucuccugcuu

SEQ ID NO: 2637 - RNA, 19 nt, Artificial Sequence
  Description of Artificial Sequence: Synthetic oligonucleotide
acccagucccucuccugcu

SEQ ID NO: 2638 - RNA, 19 nt, Artificial Sequence
  Description of Artificial Sequence: Synthetic oligonucleotide
gacccagucccucuccugc

SEQ ID NO: 2639 - RNA, 19 nt, Artificial Sequence
  Description of Artificial Sequence: Synthetic oligonucleotide
ugacccagucccucuccug

SEQ ID NO: 2640 - RNA, 19 nt, Artificial Sequence
  Description of Artificial Sequence: Synthetic oligonucleotide
cugacccagucccucuccu

SEQ ID NO: 2641 - RNA, 19 nt, Artificial Sequence
  Description of Artificial Sequence: Synthetic oligonucleotide
gcugacccagucccucucc

SEQ ID NO: 2642 - RNA, 19 nt, Artificial Sequence
  Description of Artificial Sequence: Synthetic oligonucleotide
cgcugacccagucccucuc

SEQ ID NO: 2643 - RNA, 19 nt, Artificial Sequence
  Description of Artificial Sequence: Synthetic oligonucleotide
acgcugacccagucccucu

SEQ ID NO: 2644 - RNA, 19 nt, Artificial Sequence
  Description of Artificial Sequence: Synthetic oligonucleotide
cacgcugacccagucccuc

SEQ ID NO: 2645 - RNA, 19 nt, Artificial Sequence
  Description of Artificial Sequence: Synthetic oligonucleotide
ccacgcugacccagucccu

SEQ ID NO: 2646 - RNA, 19 nt, Artificial Sequence
  Description of Artificial Sequence: Synthetic oligonucleotide
accacgcugacccaguccc

SEQ ID NO: 2647 - RNA, 19 nt, Artificial Sequence
  Description of Artificial Sequence: Synthetic oligonucleotide
gaccacgcugacccagucc

SEQ ID NO: 2648 - RNA, 19 nt, Artificial Sequence
  Description of Artificial Sequence: Synthetic oligonucleotide
ugaccacgcugacccaguc

SEQ ID NO: 2649 - RNA, 19 nt, Artificial Sequence
  Description of Artificial Sequence: Synthetic oligonucleotide
augaccacgcugacccagu

SEQ ID NO: 2650 - RNA, 19 nt, Artificial Sequence
  Description of Artificial Sequence: Synthetic oligonucleotide
caugaccacgcugacccag

SEQ ID NO: 2651 - RNA, 19 nt, Artificial Sequence
  Description of Artificial Sequence: Synthetic oligonucleotide
gcaugaccacgcugaccca

SEQ ID NO: 2652 - RNA, 19 nt, Artificial Sequence
  Description of Artificial Sequence: Synthetic oligonucleotide
ugcaugaccacgcugaccc

SEQ ID NO: 2653 - RNA, 19 nt, Artificial Sequence
  Description of Artificial Sequence: Synthetic oligonucleotide
cugcaugaccacgcugacc

SEQ ID NO: 2654 - RNA, 19 nt, Artificial Sequence
  Description of Artificial Sequence: Synthetic oligonucleotide
ccugcaugaccacgcugac

SEQ ID NO: 2655 - RNA, 19 nt, Artificial Sequence
  Description of Artificial Sequence: Synthetic oligonucleotide
accugcaugaccacgcuga

SEQ ID NO: 2656 - RNA, 19 nt, Artificial Sequence
  Description of Artificial Sequence: Synthetic oligonucleotide
caccugcaugaccacgcug

SEQ ID NO: 2657 - RNA, 19 nt, Artificial Sequence
  Description of Artificial Sequence: Synthetic oligonucleotide
ucaccugcaugaccacgcu

SEQ ID NO: 2658 - RNA, 19 nt, Artificial Sequence
  Description of Artificial Sequence: Synthetic oligonucleotide
aucaccugcaugaccacgc

SEQ ID NO: 2659 - RNA, 19 nt, Artificial Sequence
  Description of Artificial Sequence: Synthetic oligonucleotide
caucaccugcaugaccacg

SEQ ID NO: 2660 - RNA, 19 nt, Artificial Sequence
  Description of Artificial Sequence: Synthetic oligonucleotide
ccaucaccugcaugaccac

SEQ ID NO: 2661 - RNA, 19 nt, Artificial Sequence
  Description of Artificial Sequence: Synthetic oligonucleotide
uccaucaccugcaugacca

SEQ ID NO: 2662 - RNA, 19 nt, Artificial Sequence
  Description of Artificial Sequence: Synthetic oligonucleotide
cuccaucaccugcaugacc

SEQ ID NO: 2663 - RNA, 19 nt, Artificial Sequence
  Description of Artificial Sequence: Synthetic oligonucleotide
gcuccaucaccugcaugac

SEQ ID NO: 2664 - RNA, 19 nt, Artificial Sequence
  Description of Artificial Sequence: Synthetic oligonucleotide
agcuccaucaccugcauga

SEQ ID NO: 2665 - RNA, 19 nt, Artificial Sequence
  Description of Artificial Sequence: Synthetic oligonucleotide
cagcuccaucaccugcaug

SEQ ID NO: 2666 - RNA, 19 nt, Artificial Sequence
  Description of Artificial Sequence: Synthetic oligonucleotide
ccagcuccaucaccugcau

SEQ ID NO: 2667 - RNA, 19 nt, Artificial Sequence
  Description of Artificial Sequence: Synthetic oligonucleotide
uccagcuccaucaccugca

SEQ ID NO: 2668 - RNA, 19 nt, Artificial Sequence
  Description of Artificial Sequence: Synthetic oligonucleotide
cuccagcuccaucaccugc

SEQ ID NO: 2669 - RNA, 19 nt, Artificial Sequence
  Description of Artificial Sequence: Synthetic oligonucleotide
ucuccagcuccaucaccug

SEQ ID NO: 2670 - RNA, 19 nt, Artificial Sequence
  Description of Artificial Sequence: Synthetic oligonucleotide
cucuccagcuccaucaccu

SEQ ID NO: 2671 - RNA, 19 nt, Artificial Sequence
  Description of Artificial Sequence: Synthetic oligonucleotide
gcucuccagcuccaucacc

SEQ ID NO: 2672 - RNA, 19 nt, Artificial Sequence
  Description of Artificial Sequence: Synthetic oligonucleotide
ugcucuccagcuccaucac

SEQ ID NO: 2673 - RNA, 19 nt, Artificial Sequence
  Description of Artificial Sequence: Synthetic oligonucleotide
uugcucuccagcuccauca

SEQ ID NO: 2674 - RNA, 19 nt, Artificial Sequence
  Description of Artificial Sequence: Synthetic oligonucleotide
guugcucuccagcuccauc

SEQ ID NO: 2675 - RNA, 19 nt, Artificial Sequence
  Description of Artificial Sequence: Synthetic oligonucleotide
uguugcucuccagcuccau

SEQ ID NO: 2676 - RNA, 19 nt, Artificial Sequence
  Description of Artificial Sequence: Synthetic oligonucleotide
cuguugcucuccagcucca

SEQ ID NO: 2677 - RNA, 19 nt, Artificial Sequence
  Description of Artificial Sequence: Synthetic oligonucleotide
gcuguugcucuccagcucc

SEQ ID NO: 2678 - RNA, 19 nt, Artificial Sequence
  Description of Artificial Sequence: Synthetic oligonucleotide
ugcuguugcucuccagcuc

SEQ ID NO: 2679 - RNA, 19 nt, Artificial Sequence
  Description of Artificial Sequence: Synthetic oligonucleotide
uugcuguugcucuccagcu

SEQ ID NO: 2680 - RNA, 19 nt, Artificial Sequence
  Description of Artificial Sequence: Synthetic oligonucleotide
cuugcuguugcucuccagc

SEQ ID NO: 2681 - RNA, 19 nt, Artificial Sequence
  Description of Artificial Sequence: Synthetic oligonucleotide
gcuugcuguugcucuccag

SEQ ID NO: 2682 - RNA, 19 nt, Artificial Sequence
  Description of Artificial Sequence: Synthetic oligonucleotide
cgcuugcuguugcucucca

SEQ ID NO: 2683 - RNA, 19 nt, Artificial Sequence
  Description of Artificial Sequence: Synthetic oligonucleotide
gcgcuugcuguugcucucc

SEQ ID NO: 2684 - RNA, 19 nt, Artificial Sequence
  Description of Artificial Sequence: Synthetic oligonucleotide
ugcgcuugcuguugcucuc

SEQ ID NO: 2685 - RNA, 19 nt, Artificial Sequence
  Description of Artificial Sequence: Synthetic oligonucleotide
augcgcuugcuguugcucu

SEQ ID NO: 2686 - RNA, 19 nt, Artificial Sequence
  Description of Artificial Sequence: Synthetic oligonucleotide
caugcgcuugcuguugcuc

SEQ ID NO: 2687 - RNA, 19 nt, Artificial Sequence
  Description of Artificial Sequence: Synthetic oligonucleotide
ccaugcgcuugcuguugcu

SEQ ID NO: 2688 - RNA, 19 nt, Artificial Sequence
  Description of Artificial Sequence: Synthetic oligonucleotide
uccaugcgcuugcuguugc

SEQ ID NO: 2689 - RNA, 19 nt, Artificial Sequence
  Description of Artificial Sequence: Synthetic oligonucleotide
cuccaugcgcuugcuguug

SEQ ID NO: 2690 - RNA, 19 nt, Artificial Sequence
  Description of Artificial Sequence: Synthetic oligonucleotide
acuccaugcgcuugcuguu

SEQ ID NO: 2691 - RNA, 19 nt, Artificial Sequence
  Description of Artificial Sequence: Synthetic oligonucleotide
gacuccaugcgcuugcugu

SEQ ID NO: 2692 - RNA, 19 nt, Artificial Sequence
  Description of Artificial Sequence: Synthetic oligonucleotide
cgacuccaugcgcuugcug

SEQ ID NO: 2693 - RNA, 19 nt, Artificial Sequence
  Description of Artificial Sequence: Synthetic oligonucleotide
gcgacuccaugcgcuugcu

SEQ ID NO: 2694 - RNA, 19 nt, Artificial Sequence
  Description of Artificial Sequence: Synthetic oligonucleotide
cgcgacuccaugcgcuugc

SEQ ID NO: 2695 - RNA, 19 nt, Artificial Sequence
  Description of Artificial Sequence: Synthetic oligonucleotide
ccgcgacuccaugcgcuug

SEQ ID NO: 2696 - RNA, 19 nt, Artificial Sequence
  Description of Artificial Sequence: Synthetic oligonucleotide
gccgcgacuccaugcgcuu

SEQ ID NO: 2697 - RNA, 19 nt, Artificial Sequence
  Description of Artificial Sequence: Synthetic oligonucleotide
agccgcgacuccaugcgcu

SEQ ID NO: 2698 - RNA, 19 nt, Artificial Sequence
  Description of Artificial Sequence: Synthetic oligonucleotide
gagccgcgacuccaugcgc

SEQ ID NO: 2699 - RNA, 19 nt, Artificial Sequence
  Description of Artificial Sequence: Synthetic oligonucleotide
ugagccgcgacuccaugcg

SEQ ID NO: 2700 - RNA, 19 nt, Artificial Sequence
  Description of Artificial Sequence: Synthetic oligonucleotide
gugagccgcgacuccaugc

SEQ ID NO: 2701 - RNA, 19 nt, Artificial Sequence
  Description of Artificial Sequence: Synthetic oligonucleotide
ugugagccgcgacuccaug

SEQ ID NO: 2702 - RNA, 19 nt, Artificial Sequence
  Description of Artificial Sequence: Synthetic oligonucleotide
cugugagccgcgacuccau

SEQ ID NO: 2703 - RNA, 19 nt, Artificial Sequence
  Description of Artificial Sequence: Synthetic oligonucleotide
ucugugagccgcgacucca

SEQ ID NO: 2704 - RNA, 19 nt, Artificial Sequence
  Description of Artificial Sequence: Synthetic oligonucleotide
aucugugagccgcgacucc

SEQ ID NO: 2705 - RNA, 19 nt, Artificial Sequence
  Description of Artificial Sequence: Synthetic oligonucleotide
caucugugagccgcgacuc

SEQ ID NO: 2706 - RNA, 19 nt, Artificial Sequence
  Description of Artificial Sequence: Synthetic oligonucleotide
gcaucugugagccgcgacu

SEQ ID NO: 2707 - RNA, 19 nt, Artificial Sequence
  Description of Artificial Sequence: Synthetic oligonucleotide
agcaucugugagccgcgac

SEQ ID NO: 2708 - RNA, 19 nt, Artificial Sequence
  Description of Artificial Sequence: Synthetic oligonucleotide
cagcaucugugagccgcga

SEQ ID NO: 2709 - RNA, 19 nt, Artificial Sequence
  Description of Artificial Sequence: Synthetic oligonucleotide
ucagcaucugugagccgcg

SEQ ID NO: 2710 - RNA, 19 nt, Artificial Sequence
  Description of Artificial Sequence: Synthetic oligonucleotide
cucagcaucugugagccgc

SEQ ID NO: 2711 - RNA, 19 nt, Artificial Sequence
  Description of Artificial Sequence: Synthetic oligonucleotide
ucucagcaucugugagccg

SEQ ID NO: 2712 - RNA, 19 nt, Artificial Sequence
  Description of Artificial Sequence: Synthetic oligonucleotide
cucucagcaucugugagcc

SEQ ID NO: 2713 - RNA, 19 nt, Artificial Sequence
  Description of Artificial Sequence: Synthetic oligonucleotide
gcucucagcaucugugagc

SEQ ID NO: 2714 - RNA, 19 nt, Artificial Sequence
  Description of Artificial Sequence: Synthetic oligonucleotide
ugcucucagcaucugugag

SEQ ID NO: 2715 - RNA, 19 nt, Artificial Sequence
  Description of Artificial Sequence: Synthetic oligonucleotide
uugcucucagcaucuguga

SEQ ID NO: 2716 - RNA, 19 nt, Artificial Sequence
  Description of Artificial Sequence: Synthetic oligonucleotide
cuugcucucagcaucugug

SEQ ID NO: 2717 - RNA, 19 nt, Artificial Sequence
  Description of Artificial Sequence: Synthetic oligonucleotide
acuugcucucagcaucugu

SEQ ID NO: 2718 - RNA, 19 nt, Artificial Sequence
  Description of Artificial Sequence: Synthetic oligonucleotide
uacuugcucucagcaucug

SEQ ID NO: 2719 - RNA, 19 nt, Artificial Sequence
  Description of Artificial Sequence: Synthetic oligonucleotide
guacuugcucucagcaucu

SEQ ID NO: 2720 - RNA, 19 nt, Artificial Sequence
  Description of Artificial Sequence: Synthetic oligonucleotide
aguacuugcucucagcauc

SEQ ID NO: 2721 - RNA, 19 nt, Artificial Sequence
  Description of Artificial Sequence: Synthetic oligonucleotide
gaguacuugcucucagcau

SEQ ID NO: 2722 - RNA, 19 nt, Artificial Sequence
  Description of Artificial Sequence: Synthetic oligonucleotide
ggaguacuugcucucagca

SEQ ID NO: 2723 - RNA, 19 nt, Artificial Sequence
  Description of Artificial Sequence: Synthetic oligonucleotide
cggaguacuugcucucagc

SEQ ID NO: 2724 - RNA, 19 nt, Artificial Sequence
  Description of Artificial Sequence: Synthetic oligonucleotide
ucggaguacuugcucucag

SEQ ID NO: 2725 - RNA, 19 nt, Artificial Sequence
  Description of Artificial Sequence: Synthetic oligonucleotide
cucggaguacuugcucuca

SEQ ID NO: 2726 - RNA, 19 nt, Artificial Sequence
  Description of Artificial Sequence: Synthetic oligonucleotide
ucucggaguacuugcucuc

SEQ ID NO: 2727 - RNA, 19 nt, Artificial Sequence
  Description of Artificial Sequence: Synthetic oligonucleotide
aucucggaguacuugcucu

SEQ ID NO: 2728 - RNA, 19 nt, Artificial Sequence
  Description of Artificial Sequence: Synthetic oligonucleotide
caucucggaguacuugcuc

SEQ ID NO: 2729 - RNA, 19 nt, Artificial Sequence
  Description of Artificial Sequence: Synthetic oligonucleotide
ucaucucggaguacuugcu

SEQ ID NO: 2730 - RNA, 19 nt, Artificial Sequence
  Description of Artificial Sequence: Synthetic oligonucleotide
uucaucucggaguacuugc

SEQ ID NO: 2731 - RNA, 19 nt, Artificial Sequence
  Description of Artificial Sequence: Synthetic oligonucleotide
guucaucucggaguacuug

SEQ ID NO: 2732 - RNA, 19 nt, Artificial Sequence
  Description of Artificial Sequence: Synthetic oligonucleotide
uguucaucucggaguacuu

SEQ ID NO: 2733 - RNA, 19 nt, Artificial Sequence
  Description of Artificial Sequence: Synthetic oligonucleotide
uuguucaucucggaguacu

SEQ ID NO: 2734 - RNA, 19 nt, Artificial Sequence
  Description of Artificial Sequence: Synthetic oligonucleotide
guuguucaucucggaguac

SEQ ID NO: 2735 - RNA, 19 nt, Artificial Sequence
  Description of Artificial Sequence: Synthetic oligonucleotide
gguuguucaucucggagua

SEQ ID NO: 2736 - RNA, 19 nt, Artificial Sequence
  Description of Artificial Sequence: Synthetic oligonucleotide
ugguuguucaucucggagu

SEQ ID NO: 2737 - RNA, 19 nt, Artificial Sequence
  Description of Artificial Sequence: Synthetic oligonucleotide
uugguuguucaucucggag

SEQ ID NO: 2738 - RNA, 19 nt, Artificial Sequence
  Description of Artificial Sequence: Synthetic oligonucleotide
uuugguuguucaucucgga

SEQ ID NO: 2739 - RNA, 19 nt, Artificial Sequence
  Description of Artificial Sequence: Synthetic oligonucleotide
auuugguuguucaucucgg

SEQ ID NO: 2740 - RNA, 19 nt, Artificial Sequence
  Description of Artificial Sequence: Synthetic oligonucleotide
aauuugguuguucaucucg

SEQ ID NO: 2741 - RNA, 19 nt, Artificial Sequence
  Description of Artificial Sequence: Synthetic oligonucleotide
caauuugguuguucaucuc

SEQ ID NO: 2742 - RNA, 19 nt, Artificial Sequence
  Description of Artificial Sequence: Synthetic oligonucleotide
ucaauuugguuguucaucu

SEQ ID NO: 2743 - RNA, 19 nt, Artificial Sequence
  Description of Artificial Sequence: Synthetic oligonucleotide
gucaauuugguuguucauc

SEQ ID NO: 2744 - RNA, 19 nt, Artificial Sequence
  Description of Artificial Sequence: Synthetic oligonucleotide
ugucaauuugguuguucau

SEQ ID NO: 2745 - RNA, 19 nt, Artificial Sequence
  Description of Artificial Sequence: Synthetic oligonucleotide
augucaauuugguuguuca

SEQ ID NO: 2746 - RNA, 19 nt, Artificial Sequence
  Description of Artificial Sequence: Synthetic oligonucleotide
gaugucaauuugguuguuc

SEQ ID NO: 2747 - RNA, 19 nt, Artificial Sequence
  Description of Artificial Sequence: Synthetic oligonucleotide
ugaugucaauuugguuguu

SEQ ID NO: 2748 - RNA, 19 nt, Artificial Sequence
  Description of Artificial Sequence: Synthetic oligonucleotide
augaugucaauuugguugu

SEQ ID NO: 2749 - RNA, 19 nt, Artificial Sequence
  Description of Artificial Sequence: Synthetic oligonucleotide
caugaugucaauuugguug

SEQ ID NO: 2750 - RNA, 19 nt, Artificial Sequence
  Description of Artificial Sequence: Synthetic oligonucleotide
gcaugaugucaauuugguu

SEQ ID NO: 2751 - RNA, 19 nt, Artificial Sequence
  Description of Artificial Sequence: Synthetic oligonucleotide
ugcaugaugucaauuuggu

SEQ ID NO: 2752 - RNA, 19 nt, Artificial Sequence
  Description of Artificial Sequence: Synthetic oligonucleotide
cugcaugaugucaauuugg

SEQ ID NO: 2753 - RNA, 19 nt, Artificial Sequence
  Description of Artificial Sequence: Synthetic oligonucleotide
gcugcaugaugucaauuug

SEQ ID NO: 2754 - RNA, 19 nt, Artificial Sequence
  Description of Artificial Sequence: Synthetic oligonucleotide
agcugcaugaugucaauuu

SEQ ID NO: 2755 - RNA, 19 nt, Artificial Sequence
  Description of Artificial Sequence: Synthetic oligonucleotide
cagcugcaugaugucaauu

SEQ ID NO: 2756 - RNA, 19 nt, Artificial Sequence
  Description of Artificial Sequence: Synthetic oligonucleotide
gcagcugcaugaugucaau

SEQ ID NO: 2757 - RNA, 19 nt, Artificial Sequence
  Description of Artificial Sequence: Synthetic oligonucleotide
ugcagcugcaugaugucaa

SEQ ID NO: 2758 - RNA, 19 nt, Artificial Sequence
  Description of Artificial Sequence: Synthetic oligonucleotide
cugcagcugcaugauguca

SEQ ID NO: 2759 - RNA, 19 nt, Artificial Sequence
  Description of Artificial Sequence: Synthetic oligonucleotide
ccugcagcugcaugauguc

SEQ ID NO: 2760 - RNA, 19 nt, Artificial Sequence
  Description of Artificial Sequence: Synthetic oligonucleotide
gccugcagcugcaugaugu

SEQ ID NO: 2761 - RNA, 19 nt, Artificial Sequence
  Description of Artificial Sequence: Synthetic oligonucleotide
ugccugcagcugcaugaug

SEQ ID NO: 2762 - RNA, 19 nt, Artificial Sequence
  Description of Artificial Sequence: Synthetic oligonucleotide
cugccugcagcugcaugau

SEQ ID NO: 2763 - RNA, 19 nt, Artificial Sequence
  Description of Artificial Sequence: Synthetic oligonucleotide
gcugccugcagcugcauga

SEQ ID NO: 2764 - RNA, 19 nt, Artificial Sequence
  Description of Artificial Sequence: Synthetic oligonucleotide
ugcugccugcagcugcaug

SEQ ID NO: 2765 - RNA, 19 nt, Artificial Sequence
  Description of Artificial Sequence: Synthetic oligonucleotide
gugcugccugcagcugcau

SEQ ID NO: 2766 - RNA, 19 nt, Artificial Sequence
  Description of Artificial Sequence: Synthetic oligonucleotide
ugugcugccugcagcugca

SEQ ID NO: 2767 - RNA, 19 nt, Artificial Sequence
  Description of Artificial Sequence: Synthetic oligonucleotide
cugugcugccugcagcugc

SEQ ID NO: 2768 - RNA, 19 nt, Artificial Sequence
  Description of Artificial Sequence: Synthetic oligonucleotide
ucugugcugccugcagcug

SEQ ID NO: 2769 - RNA, 19 nt, Artificial Sequence
  Description of Artificial Sequence: Synthetic oligonucleotide
gucugugcugccugcagcu

SEQ ID NO: 2770 - RNA, 19 nt, Artificial Sequence
  Description of Artificial Sequence: Synthetic oligonucleotide
cgucugugcugccugcagc

SEQ ID NO: 2771 - RNA, 19 nt, Artificial Sequence
  Description of Artificial Sequence: Synthetic oligonucleotide
ccgucugugcugccugcag

SEQ ID NO: 2772 - RNA, 19 nt, Artificial Sequence
  Description of Artificial Sequence: Synthetic oligonucleotide
accgucugugcugccugca

SEQ ID NO: 2773 - RNA, 19 nt, Artificial Sequence
  Description of Artificial Sequence: Synthetic oligonucleotide
gaccgucugugcugccugc

SEQ ID NO: 2774 - RNA, 19 nt, Artificial Sequence
  Description of Artificial Sequence: Synthetic oligonucleotide
ugaccgucugugcugccug

SEQ ID NO: 2775 - RNA, 19 nt, Artificial Sequence
  Description of Artificial Sequence: Synthetic oligonucleotide
gugaccgucugugcugccu

SEQ ID NO: 2776 - RNA, 19 nt, Artificial Sequence
  Description of Artificial Sequence: Synthetic oligonucleotide
agugaccgucugugcugcc

SEQ ID NO: 2777 - RNA, 19 nt, Artificial Sequence
  Description of Artificial Sequence: Synthetic oligonucleotide
gagugaccgucugugcugc

SEQ ID NO: 2778 - RNA, 19 nt, Artificial Sequence
  Description of Artificial Sequence: Synthetic oligonucleotide
ugagugaccgucugugcug

SEQ ID NO: 2779 - RNA, 19 nt, Artificial Sequence
  Description of Artificial Sequence: Synthetic oligonucleotide
cugagugaccgucugugcu

SEQ ID NO: 2780 - RNA, 19 nt, Artificial Sequence
  Description of Artificial Sequence: Synthetic oligonucleotide
ucugagugaccgucugugc

SEQ ID NO: 2781 - RNA, 19 nt, Artificial Sequence
  Description of Artificial Sequence: Synthetic oligonucleotide
gucugagugaccgucugug

SEQ ID NO: 2782 - RNA, 19 nt, Artificial Sequence
  Description of Artificial Sequence: Synthetic oligonucleotide
ggucugagugaccgucugu

SEQ ID NO: 2783 - RNA, 19 nt, Artificial Sequence
  Description of Artificial Sequence: Synthetic oligonucleotide
aggucugagugaccgucug

SEQ ID NO: 2784 - RNA, 19 nt, Artificial Sequence
  Description of Artificial Sequence: Synthetic oligonucleotide
gaggucugagugaccgucu

SEQ ID NO: 2785 - RNA, 19 nt, Artificial Sequence
  Description of Artificial Sequence: Synthetic oligonucleotide
ggaggucugagugaccguc

SEQ ID NO: 2786 - RNA, 19 nt, Artificial Sequence
  Description of Artificial Sequence: Synthetic oligonucleotide
cggaggucugagugaccgu

SEQ ID NO: 2787 - RNA, 19 nt, Artificial Sequence
  Description of Artificial Sequence: Synthetic oligonucleotide
gcggaggucugagugaccg

SEQ ID NO: 2788 - RNA, 19 nt, Artificial Sequence
  Description of Artificial Sequence: Synthetic oligonucleotide
ugcggaggucugagugacc

SEQ ID NO: 2789 - RNA, 19 nt, Artificial Sequence
  Description of Artificial Sequence: Synthetic oligonucleotide
cugcggaggucugagugac

SEQ ID NO: 2790 - RNA, 19 nt, Artificial Sequence
  Description of Artificial Sequence: Synthetic oligonucleotide
ucugcggaggucugaguga

SEQ ID NO: 2791 - RNA, 19 nt, Artificial Sequence
  Description of Artificial Sequence: Synthetic oligonucleotide
aucugcggaggucugagug

SEQ ID NO: 2792 - RNA, 19 nt, Artificial Sequence
  Description of Artificial Sequence: Synthetic oligonucleotide
caucugcggaggucugagu

SEQ ID NO: 2793 - RNA, 19 nt, Artificial Sequence
  Description of Artificial Sequence: Synthetic oligonucleotide
gcaucugcggaggucugag

SEQ ID NO: 2794 - RNA, 19 nt, Artificial Sequence
  Description of Artificial Sequence: Synthetic oligonucleotide
ggcaucugcggaggucuga

SEQ ID NO: 2795 - RNA, 19 nt, Artificial Sequence
  Description of Artificial Sequence: Synthetic oligonucleotide
uggcaucugcggaggucug

SEQ ID NO: 2796 - RNA, 19 nt, Artificial Sequence
  Description of Artificial Sequence: Synthetic oligonucleotide
auggcaucugcggaggucu

SEQ ID NO: 2797 - RNA, 19 nt, Artificial Sequence
  Description of Artificial Sequence: Synthetic oligonucleotide
gauggcaucugcggagguc

SEQ ID NO: 2798 - RNA, 19 nt, Artificial Sequence
  Description of Artificial Sequence: Synthetic oligonucleotide
agauggcaucugcggaggu

SEQ ID NO: 2799 - RNA, 19 nt, Artificial Sequence
  Description of Artificial Sequence: Synthetic oligonucleotide
uagauggcaucugcggagg

SEQ ID NO: 2800 - RNA, 19 nt, Artificial Sequence
  Description of Artificial Sequence: Synthetic oligonucleotide
guagauggcaucugcggag

SEQ ID NO: 2801 - RNA, 19 nt, Artificial Sequence
  Description of Artificial Sequence: Synthetic oligonucleotide
cguagauggcaucugcgga

SEQ ID NO: 2802 - RNA, 19 nt, Artificial Sequence
  Description of Artificial Sequence: Synthetic oligonucleotide
ucguagauggcaucugcgg

SEQ ID NO: 2803 - RNA, 19 nt, Artificial Sequence
  Description of Artificial Sequence: Synthetic oligonucleotide
gucguagauggcaucugcg

SEQ ID NO: 2804 - RNA, 19 nt, Artificial Sequence
  Description of Artificial Sequence: Synthetic oligonucleotide
agucguagauggcaucugc

SEQ ID NO: 2805 - RNA, 19 nt, Artificial Sequence
  Description of Artificial Sequence: Synthetic oligonucleotide
cagucguagauggcaucug

SEQ ID NO: 2806 - RNA, 19 nt, Artificial Sequence
  Description of Artificial Sequence: Synthetic oligonucleotide
gcagucguagauggcaucu

SEQ ID NO: 2807 - RNA, 19 nt, Artificial Sequence
  Description of Artificial Sequence: Synthetic oligonucleotide
agcagucguagauggcauc

SEQ ID NO: 2808 - RNA, 19 nt, Artificial Sequence
  Description of Artificial Sequence: Synthetic oligonucleotide
gagcagucguagauggcau

SEQ ID NO: 2809 - RNA, 19 nt, Artificial Sequence
  Description of Artificial Sequence: Synthetic oligonucleotide
agagcagucguagauggca

SEQ ID NO: 2810 - RNA, 19 nt, Artificial Sequence
  Description of Artificial Sequence: Synthetic oligonucleotide
aagagcagucguagauggc

SEQ ID NO: 2811 - RNA, 19 nt, Artificial Sequence
  Description of Artificial Sequence: Synthetic oligonucleotide
gaagagcagucguagaugg

SEQ ID NO: 2812 - RNA, 19 nt, Artificial Sequence
  Description of Artificial Sequence: Synthetic oligonucleotide
ggaagagcagucguagaug

SEQ ID NO: 2813 - RNA, 19 nt, Artificial Sequence
  Description of Artificial Sequence: Synthetic oligonucleotide
gggaagagcagucguagau

SEQ ID NO: 2814 - RNA, 19 nt, Artificial Sequence
  Description of Artificial Sequence: Synthetic oligonucleotide
agggaagagcagucguaga

SEQ ID NO: 2815 - RNA, 19 nt, Artificial Sequence
  Description of Artificial Sequence: Synthetic oligonucleotide
gagggaagagcagucguag

SEQ ID NO: 2816 - RNA, 19 nt, Artificial Sequence
  Description of Artificial Sequence: Synthetic oligonucleotide
agagggaagagcagucgua

SEQ ID NO: 2817 - RNA, 19 nt, Artificial Sequence
  Description of Artificial Sequence: Synthetic oligonucleotide
uagagggaagagcagucgu

SEQ ID NO: 2818 - RNA, 19 nt, Artificial Sequence
  Description of Artificial Sequence: Synthetic oligonucleotide
guagagggaagagcagucg

SEQ ID NO: 2819 - RNA, 19 nt, Artificial Sequence
  Description of Artificial Sequence: Synthetic oligonucleotide
gguagagggaagagcaguc

SEQ ID NO: 2820 - RNA, 19 nt, Artificial Sequence
  Description of Artificial Sequence: Synthetic oligonucleotide
ugguagagggaagagcagu

SEQ ID NO: 2821 - RNA, 19 nt, Artificial Sequence
  Description of Artificial Sequence: Synthetic oligonucleotide
cugguagagggaagagcag

SEQ ID NO: 2822 - RNA, 19 nt, Artificial Sequence
  Description of Artificial Sequence: Synthetic oligonucleotide
ucugguagagggaagagca

SEQ ID NO: 2823 - RNA, 19 nt, Artificial Sequence
  Description of Artificial Sequence: Synthetic oligonucleotide
uucugguagagggaagagc

SEQ ID NO: 2824 - RNA, 19 nt, Artificial Sequence
  Description of Artificial Sequence: Synthetic oligonucleotide
cuucugguagagggaagag

SEQ ID NO: 2825 - RNA, 19 nt, Artificial Sequence
  Description of Artificial Sequence: Synthetic oligonucleotide
ucuucugguagagggaaga

SEQ ID NO: 2826 - RNA, 19 nt, Artificial Sequence
  Description of Artificial Sequence: Synthetic oligonucleotide
uucuucugguagagggaag

SEQ ID NO: 2827 - RNA, 19 nt, Artificial Sequence
  Description of Artificial Sequence: Synthetic oligonucleotide
guucuucugguagagggaa

SEQ ID NO: 2828 - RNA, 19 nt, Artificial Sequence
  Description of Artificial Sequence: Synthetic oligonucleotide
aguucuucugguagaggga

SEQ ID NO: 2829 - RNA, 19 nt, Artificial Sequence
  Description of Artificial Sequence: Synthetic oligonucleotide
uaguucuucugguagaggg

SEQ ID NO: 2830 - RNA, 19 nt, Artificial Sequence
  Description of Artificial Sequence: Synthetic oligonucleotide
guaguucuucugguagagg

SEQ ID NO: 2831 - RNA, 19 nt, Artificial Sequence
  Description of Artificial Sequence: Synthetic oligonucleotide
gguaguucuucugguagag

SEQ ID NO: 2832 - RNA, 19 nt, Artificial Sequence
  Description of Artificial Sequence: Synthetic oligonucleotide
cgguaguucuucugguaga

SEQ ID NO: 2833 - RNA, 19 nt, Artificial Sequence
  Description of Artificial Sequence: Synthetic oligonucleotide
gcgguaguucuucugguag

SEQ ID NO: 2834 - RNA, 19 nt, Artificial Sequence
  Description of Artificial Sequence: Synthetic oligonucleotide
ugcgguaguucuucuggua

SEQ ID NO: 2835 - RNA, 19 nt, Artificial Sequence
  Description of Artificial Sequence: Synthetic oligonucleotide
augcgguaguucuucuggu

SEQ ID NO: 2836 - RNA, 19 nt, Artificial Sequence
  Description of Artificial Sequence: Synthetic oligonucleotide
gaugcgguaguucuucugg

SEQ ID NO: 2837 - RNA, 19 nt, Artificial Sequence
  Description of Artificial Sequence: Synthetic oligonucleotide
agaugcgguaguucuucug

SEQ ID NO: 2838 - RNA, 19 nt, Artificial Sequence
  Description of Artificial Sequence: Synthetic oligonucleotide
gagaugcgguaguucuucu

SEQ ID NO: 2839 - RNA, 19 nt, Artificial Sequence
  Description of Artificial Sequence: Synthetic oligonucleotide
agagaugcgguaguucuuc

SEQ ID NO: 2840 - RNA, 19 nt, Artificial Sequence
  Description of Artificial Sequence: Synthetic oligonucleotide
cagagaugcgguaguucuu

SEQ ID NO: 2841 - RNA, 19 nt, Artificial Sequence
  Description of Artificial Sequence: Synthetic oligonucleotide
ccagagaugcgguaguucu

SEQ ID NO: 2842 - RNA, 19 nt, Artificial Sequence
  Description of Artificial Sequence: Synthetic oligonucleotide
uccagagaugcgguaguuc

SEQ ID NO: 2843 - RNA, 19 nt, Artificial Sequence
  Description of Artificial Sequence: Synthetic oligonucleotide
cuccagagaugcgguaguu

SEQ ID NO: 2844 - RNA, 19 nt, Artificial Sequence
  Description of Artificial Sequence: Synthetic oligonucleotide
acuccagagaugcgguagu

SEQ ID NO: 2845 - RNA, 19 nt, Artificial Sequence
  Description of Artificial Sequence: Synthetic oligonucleotide
cacuccagagaugcgguag

SEQ ID NO: 2846 - RNA, 19 nt, Artificial Sequence
  Description of Artificial Sequence: Synthetic oligonucleotide
acacuccagagaugcggua

SEQ ID NO: 2847 - RNA, 19 nt, Artificial Sequence
  Description of Artificial Sequence: Synthetic oligonucleotide
uacacuccagagaugcggu

SEQ ID NO: 2848 - RNA, 19 nt, Artificial Sequence
  Description of Artificial Sequence: Synthetic oligonucleotide
auacacuccagagaugcgg

SEQ ID NO: 2849 - RNA, 19 nt, Artificial Sequence
  Description of Artificial Sequence: Synthetic oligonucleotide
uauacacuccagagaugcg

SEQ ID NO: 2850 - RNA, 19 nt, Artificial Sequence
  Description of Artificial Sequence: Synthetic oligonucleotide
uuauacacuccagagaugc

SEQ ID NO: 2851 - RNA, 19 nt, Artificial Sequence
  Description of Artificial Sequence: Synthetic oligonucleotide
cuuauacacuccagagaug

SEQ ID NO: 2852 - RNA, 19 nt, Artificial Sequence
  Description of Artificial Sequence: Synthetic oligonucleotide
gcuuauacacuccagagau

SEQ ID NO: 2853 - RNA, 19 nt, Artificial Sequence
  Description of Artificial Sequence: Synthetic oligonucleotide
agcuuauacacuccagaga

SEQ ID NO: 2854 - RNA, 19 nt, Artificial Sequence
  Description of Artificial Sequence: Synthetic oligonucleotide
aagcuuauacacuccagag

SEQ ID NO: 2855 - RNA, 19 nt, Artificial Sequence
  Description of Artificial Sequence: Synthetic oligonucleotide
gaagcuuauacacuccaga

SEQ ID NO: 2856 - RNA, 19 nt, Artificial Sequence
  Description of Artificial Sequence: Synthetic oligonucleotide
ggaagcuuauacacuccag

SEQ ID NO: 2857 - RNA, 19 nt, Artificial Sequence
  Description of Artificial Sequence: Synthetic oligonucleotide
aggaagcuuauacacucca

SEQ ID NO: 2858 - RNA, 19 nt, Artificial Sequence
  Description of Artificial Sequence: Synthetic oligonucleotide
gaggaagcuuauacacucc

SEQ ID NO: 2859 - RNA, 19 nt, Artificial Sequence
  Description of Artificial Sequence: Synthetic oligonucleotide
ggaggaagcuuauacacuc

SEQ ID NO: 2860 - RNA, 19 nt, Artificial Sequence
  Description of Artificial Sequence: Synthetic oligonucleotide
aggaggaagcuuauacacu

SEQ ID NO: 2861 - RNA, 19 nt, Artificial Sequence
  Description of Artificial Sequence: Synthetic oligonucleotide
caggaggaagcuuauacac

SEQ ID NO: 2862 - RNA, 19 nt, Artificial Sequence
  Description of Artificial Sequence: Synthetic oligonucleotide
ucaggaggaagcuuauaca

SEQ ID NO: 2863 - RNA, 19 nt, Artificial Sequence
  Description of Artificial Sequence: Synthetic oligonucleotide
aucaggaggaagcuuauac

SEQ ID NO: 2864 - RNA, 19 nt, Artificial Sequence
  Description of Artificial Sequence: Synthetic oligonucleotide
caucaggaggaagcuuaua

SEQ ID NO: 2865 - RNA, 19 nt, Artificial Sequence
  Description of Artificial Sequence: Synthetic oligonucleotide
ucaucaggaggaagcuuau

SEQ ID NO: 2866 - RNA, 19 nt, Artificial Sequence
  Description of Artificial Sequence: Synthetic oligonucleotide
gucaucaggaggaagcuua

SEQ ID NO: 2867 - RNA, 19 nt, Artificial Sequence
  Description of Artificial Sequence: Synthetic oligonucleotide
agucaucaggaggaagcuu

SEQ ID NO: 2868 - RNA, 19 nt, Artificial Sequence
  Description of Artificial Sequence: Synthetic oligonucleotide
aagucaucaggaggaagcu

SEQ ID NO: 2869 - RNA, 19 nt, Artificial Sequence
  Description of Artificial Sequence: Synthetic oligonucleotide
gaagucaucaggaggaagc

SEQ ID NO: 2870 - RNA, 19 nt, Artificial Sequence
  Description of Artificial Sequence: Synthetic oligonucleotide
ggaagucaucaggaggaag

SEQ ID NO: 2871 - RNA, 19 nt, Artificial Sequence
  Description of Artificial Sequence: Synthetic oligonucleotide
aggaagucaucaggaggaa

SEQ ID NO: 2872 - RNA, 19 nt, Artificial Sequence
  Description of Artificial Sequence: Synthetic oligonucleotide
caggaagucaucaggagga

SEQ ID NO: 2873 - RNA, 19 nt, Artificial Sequence
  Description of Artificial Sequence: Synthetic oligonucleotide
ccaggaagucaucaggagg

SEQ ID NO: 2874 - RNA, 19 nt, Artificial Sequence
  Description of Artificial Sequence: Synthetic oligonucleotide
cccaggaagucaucaggag

SEQ ID NO: 2875 - RNA, 19 nt, Artificial Sequence
  Description of Artificial Sequence: Synthetic oligonucleotide
gcccaggaagucaucagga

SEQ ID NO: 2876 - RNA, 19 nt, Artificial Sequence
  Description of Artificial Sequence: Synthetic oligonucleotide
ugcccaggaagucaucagg

SEQ ID NO: 2877 - RNA, 19 nt, Artificial Sequence
  Description of Artificial Sequence: Synthetic oligonucleotide
cugcccaggaagucaucag

SEQ ID NO: 2878 - RNA, 19 nt, Artificial Sequence
  Description of Artificial Sequence: Synthetic oligonucleotide
gcugcccaggaagucauca

SEQ ID NO: 2879 - RNA, 19 nt, Artificial Sequence
  Description of Artificial Sequence: Synthetic oligonucleotide
ggcugcccaggaagucauc

SEQ ID NO: 2880 - RNA, 19 nt, Artificial Sequence
  Description of Artificial Sequence: Synthetic oligonucleotide
gggcugcccaggaagucau

SEQ ID NO: 2881 - RNA, 19 nt, Artificial Sequence
  Description of Artificial Sequence: Synthetic oligonucleotide
agggcugcccaggaaguca

SEQ ID NO: 2882 - RNA, 19 nt, Artificial Sequence
  Description of Artificial Sequence: Synthetic oligonucleotide
cagggcugcccaggaaguc

SEQ ID NO: 2883 - RNA, 19 nt, Artificial Sequence
  Description of Artificial Sequence: Synthetic oligonucleotide
ucagggcugcccaggaagu

SEQ ID NO: 2884 - RNA, 19 nt, Artificial Sequence
  Description of Artificial Sequence: Synthetic oligonucleotide
uucagggcugcccaggaag

SEQ ID NO: 2885 - RNA, 19 nt, Artificial Sequence
  Description of Artificial Sequence: Synthetic oligonucleotide
guucagggcugcccaggaa

SEQ ID NO: 2886 - RNA, 19 nt, Artificial Sequence
  Description of Artificial Sequence: Synthetic oligonucleotide
aguucagggcugcccagga

SEQ ID NO: 2887 - RNA, 19 nt, Artificial Sequence
  Description of Artificial Sequence: Synthetic oligonucleotide
caguucagggcugcccagg

SEQ ID NO: 2888 - RNA, 19 nt, Artificial Sequence
  Description of Artificial Sequence: Synthetic oligonucleotide
ccaguucagggcugcccag

SEQ ID NO: 2889 - RNA, 19 nt, Artificial Sequence
  Description of Artificial Sequence: Synthetic oligonucleotide
uccaguucagggcugccca

SEQ ID NO: 2890 - RNA, 19 nt, Artificial Sequence
  Description of Artificial Sequence: Synthetic oligonucleotide
cuccaguucagggcugccc

SEQ ID NO: 2891 - RNA, 19 nt, Artificial Sequence
  Description of Artificial Sequence: Synthetic oligonucleotide
ccuccaguucagggcugcc

SEQ ID NO: 2892 - RNA, 19 nt, Artificial Sequence
  Description of Artificial Sequence: Synthetic oligonucleotide
accuccaguucagggcugc

SEQ ID NO: 2893 - RNA, 19 nt, Artificial Sequence
  Description of Artificial Sequence: Synthetic oligonucleotide
caccuccaguucagggcug

SEQ ID NO: 2894 - RNA, 19 nt, Artificial Sequence
  Description of Artificial Sequence: Synthetic oligonucleotide
acaccuccaguucagggcu

SEQ ID NO: 2895 - RNA, 19 nt, Artificial Sequence
  Description of Artificial Sequence: Synthetic oligonucleotide
aacaccuccaguucagggc

SEQ ID NO: 2896 - RNA, 19 nt, Artificial Sequence
  Description of Artificial Sequence: Synthetic oligonucleotide
gaacaccuccaguucaggg

SEQ ID NO: 2897 - RNA, 19 nt, Artificial Sequence
  Description of Artificial Sequence: Synthetic oligonucleotide
agaacaccuccaguucagg

SEQ ID NO: 2898 - RNA, 19 nt, Artificial Sequence
  Description of Artificial Sequence: Synthetic oligonucleotide
cagaacaccuccaguucag

SEQ ID NO: 2899 - RNA, 19 nt, Artificial Sequence
  Description of Artificial Sequence: Synthetic oligonucleotide
acagaacaccuccaguuca

SEQ ID NO: 2900 - RNA, 19 nt, Artificial Sequence
  Description of Artificial Sequence: Synthetic oligonucleotide
cacagaacaccuccaguuc

SEQ ID NO: 2901 - RNA, 19 nt, Artificial Sequence
  Description of Artificial Sequence: Synthetic oligonucleotide
ucacagaacaccuccaguu

SEQ ID NO: 2902 - RNA, 19 nt, Artificial Sequence
  Description of Artificial Sequence: Synthetic oligonucleotide
gucacagaacaccuccagu

SEQ ID NO: 2903 - RNA, 19 nt, Artificial Sequence
  Description of Artificial Sequence: Synthetic oligonucleotide
ugucacagaacaccuccag

SEQ ID NO: 2904 - RNA, 19 nt, Artificial Sequence
  Description of Artificial Sequence: Synthetic oligonucleotide
augucacagaacaccucca

SEQ ID NO: 2905 - RNA, 19 nt, Artificial Sequence
  Description of Artificial Sequence: Synthetic oligonucleotide
caugucacagaacaccucc

SEQ ID NO: 2906 - RNA, 19 nt, Artificial Sequence
  Description of Artificial Sequence: Synthetic oligonucleotide
ccaugucacagaacaccuc

SEQ ID NO: 2907 - RNA, 19 nt, Artificial Sequence
  Description of Artificial Sequence: Synthetic oligonucleotide
uccaugucacagaacaccu

SEQ ID NO: 2908 - RNA, 19 nt, Artificial Sequence
  Description of Artificial Sequence: Synthetic oligonucleotide
cuccaugucacagaacacc

SEQ ID NO: 2909 - RNA, 19 nt, Artificial Sequence
  Description of Artificial Sequence: Synthetic oligonucleotide
ucuccaugucacagaacac

SEQ ID NO: 2910 - RNA, 19 nt, Artificial Sequence
  Description of Artificial Sequence: Synthetic oligonucleotide
gucuccaugucacagaaca

SEQ ID NO: 2911 - RNA, 19 nt, Artificial Sequence
  Description of Artificial Sequence: Synthetic oligonucleotide
agucuccaugucacagaac

SEQ ID NO: 2912 - RNA, 19 nt, Artificial Sequence
  Description of Artificial Sequence: Synthetic oligonucleotide
aagucuccaugucacagaa

SEQ ID NO: 2913 - RNA, 19 nt, Artificial Sequence
  Description of Artificial Sequence: Synthetic oligonucleotide
gaagucuccaugucacaga

SEQ ID NO: 2914 - RNA, 19 nt, Artificial Sequence
  Description of Artificial Sequence: Synthetic oligonucleotide
ugaagucuccaugucacag

SEQ ID NO: 2915 - RNA, 19 nt, Artificial Sequence
  Description of Artificial Sequence: Synthetic oligonucleotide
cugaagucuccaugucaca

SEQ ID NO: 2916 - RNA, 19 nt, Artificial Sequence
  Description of Artificial Sequence: Synthetic oligonucleotide
ccugaagucuccaugucac

SEQ ID NO: 2917 - RNA, 19 nt, Artificial Sequence
  Description of Artificial Sequence: Synthetic oligonucleotide
gccugaagucuccauguca

SEQ ID NO: 2918 - RNA, 19 nt, Artificial Sequence
  Description of Artificial Sequence: Synthetic oligonucleotide
cgccugaagucuccauguc

SEQ ID NO: 2919 - RNA, 19 nt, Artificial Sequence
  Description of Artificial Sequence: Synthetic oligonucleotide
ccgccugaagucuccaugu

SEQ ID NO: 2920 - RNA, 19 nt, Artificial Sequence
  Description of Artificial Sequence: Synthetic oligonucleotide
uccgccugaagucuccaug

SEQ ID NO: 2921 - RNA, 19 nt, Artificial Sequence
  Description of Artificial Sequence: Synthetic oligonucleotide
cuccgccugaagucuccau

SEQ ID NO: 2922 - RNA, 19 nt, Artificial Sequence
  Description of Artificial Sequence: Synthetic oligonucleotide
ccuccgccugaagucucca

SEQ ID NO: 2923 - RNA, 19 nt, Artificial Sequence
  Description of Artificial Sequence: Synthetic oligonucleotide
gccuccgccugaagucucc

SEQ ID NO: 2924 - RNA, 19 nt, Artificial Sequence
  Description of Artificial Sequence: Synthetic oligonucleotide
agccuccgccugaagucuc

SEQ ID NO: 2925 - RNA, 19 nt, Artificial Sequence
  Description of Artificial Sequence: Synthetic oligonucleotide
cagccuccgccugaagucu

SEQ ID NO: 2926 - RNA, 19 nt, Artificial Sequence
  Description of Artificial Sequence: Synthetic oligonucleotide
ccagccuccgccugaaguc

SEQ ID NO: 2927 - RNA, 19 nt, Artificial Sequence
  Description of Artificial Sequence: Synthetic oligonucleotide
uccagccuccgccugaagu

SEQ ID NO: 2928 - RNA, 19 nt, Artificial Sequence
  Description of Artificial Sequence: Synthetic oligonucleotide
guccagccuccgccugaag

SEQ ID NO: 2929 - RNA, 19 nt, Artificial Sequence
  Description of Artificial Sequence: Synthetic oligonucleotide
gguccagccuccgccugaa

SEQ ID NO: 2930 - RNA, 19 nt, Artificial Sequence
  Description of Artificial Sequence: Synthetic oligonucleotide
ugguccagccuccgccuga

SEQ ID NO: 2931 - RNA, 19 nt, Artificial Sequence
  Description of Artificial Sequence: Synthetic oligonucleotide
augguccagccuccgccug

SEQ ID NO: 2932 - RNA, 19 nt, Artificial Sequence
  Description of Artificial Sequence: Synthetic oligonucleotide
gaugguccagccuccgccu

SEQ ID NO: 2933 - RNA, 19 nt, Artificial Sequence
  Description of Artificial Sequence: Synthetic oligonucleotide
ugaugguccagccuccgcc

SEQ ID NO: 2934 - RNA, 19 nt, Artificial Sequence
  Description of Artificial Sequence: Synthetic oligonucleotide
augaugguccagccuccgc

SEQ ID NO: 2935 - RNA, 19 nt, Artificial Sequence
  Description of Artificial Sequence: Synthetic oligonucleotide
gaugaugguccagccuccg

SEQ ID NO: 2936 - RNA, 19 nt, Artificial Sequence
  Description of Artificial Sequence: Synthetic oligonucleotide
ggaugaugguccagccucc

SEQ ID NO: 2937 - RNA, 19 nt, Artificial Sequence
  Description of Artificial Sequence: Synthetic oligonucleotide
uggaugaugguccagccuc

SEQ ID NO: 2938 - RNA, 19 nt, Artificial Sequence
  Description of Artificial Sequence: Synthetic oligonucleotide
cuggaugaugguccagccu

SEQ ID NO: 2939 - RNA, 19 nt, Artificial Sequence
  Description of Artificial Sequence: Synthetic oligonucleotide
ucuggaugaugguccagcc

SEQ ID NO: 2940 - RNA, 19 nt, Artificial Sequence
  Description of Artificial Sequence: Synthetic oligonucleotide
cucuggaugaugguccagc

SEQ ID NO: 2941 - RNA, 19 nt, Artificial Sequence
  Description of Artificial Sequence: Synthetic oligonucleotide
ucucuggaugaugguccag

SEQ ID NO: 2942 - RNA, 19 nt, Artificial Sequence
  Description of Artificial Sequence: Synthetic oligonucleotide
gucucuggaugauggucca

SEQ ID NO: 2943 - RNA, 19 nt, Artificial Sequence
  Description of Artificial Sequence: Synthetic oligonucleotide
cgucucuggaugauggucc

SEQ ID NO: 2944 - RNA, 19 nt, Artificial Sequence
  Description of Artificial Sequence: Synthetic oligonucleotide
ucgucucuggaugaugguc

SEQ ID NO: 2945 - RNA, 19 nt, Artificial Sequence
  Description of Artificial Sequence: Synthetic oligonucleotide
uucgucucuggaugauggu

SEQ ID NO: 2946 - RNA, 19 nt, Artificial Sequence
  Description of Artificial Sequence: Synthetic oligonucleotide
uuucgucucuggaugaugg

SEQ ID NO: 2947 - RNA, 19 nt, Artificial Sequence
  Description of Artificial Sequence: Synthetic oligonucleotide
uuuucgucucuggaugaug

SEQ ID NO: 2948 - RNA, 19 nt, Artificial Sequence
  Description of Artificial Sequence: Synthetic oligonucleotide
uuuuucgucucuggaugau

SEQ ID NO: 2949 - RNA, 19 nt, Artificial Sequence
  Description of Artificial Sequence: Synthetic oligonucleotide
cuuuuucgucucuggauga

SEQ ID NO: 2950 - RNA, 19 nt, Artificial Sequence
  Description of Artificial Sequence: Synthetic oligonucleotide
acuuuuucgucucuggaug

SEQ ID NO: 2951 - RNA, 19 nt, Artificial Sequence
  Description of Artificial Sequence: Synthetic oligonucleotide
cacuuuuucgucucuggau

SEQ ID NO: 2952 - RNA, 19 nt, Artificial Sequence
  Description of Artificial Sequence: Synthetic oligonucleotide
ccacuuuuucgucucugga

SEQ ID NO: 2953 - RNA, 19 nt, Artificial Sequence
  Description of Artificial Sequence: Synthetic oligonucleotide
gccacuuuuucgucucugg

SEQ ID NO: 2954 - RNA, 19 nt, Artificial Sequence
  Description of Artificial Sequence: Synthetic oligonucleotide
ggccacuuuuucgucucug

SEQ ID NO: 2955 - RNA, 19 nt, Artificial Sequence
  Description of Artificial Sequence: Synthetic oligonucleotide
aggccacuuuuucgucucu

SEQ ID NO: 2956 - RNA, 19 nt, Artificial Sequence
  Description of Artificial Sequence: Synthetic oligonucleotide
aaggccacuuuuucgucuc

SEQ ID NO: 2957 - RNA, 19 nt, Artificial Sequence
  Description of Artificial Sequence: Synthetic oligonucleotide
caaggccacuuuuucgucu

SEQ ID NO: 2958 - RNA, 19 nt, Artificial Sequence
  Description of Artificial Sequence: Synthetic oligonucleotide
acaaggccacuuuuucguc

SEQ ID NO: 2959 - RNA, 19 nt, Artificial Sequence
  Description of Artificial Sequence: Synthetic oligonucleotide
gacaaggccacuuuuucgu

SEQ ID NO: 2960 - RNA, 19 nt, Artificial Sequence
  Description of Artificial Sequence: Synthetic oligonucleotide
agacaaggccacuuuuucg

SEQ ID NO: 2961 - RNA, 19 nt, Artificial Sequence
  Description of Artificial Sequence: Synthetic oligonucleotide
gagacaaggccacuuuuuc

SEQ ID NO: 2962 - RNA, 19 nt, Artificial Sequence
  Description of Artificial Sequence: Synthetic oligonucleotide
ggagacaaggccacuuuuu

SEQ ID NO: 2963 - RNA, 19 nt, Artificial Sequence
  Description of Artificial Sequence: Synthetic oligonucleotide
aggagacaaggccacuuuu

SEQ ID NO: 2964 - RNA, 19 nt, Artificial Sequence
  Description of Artificial Sequence: Synthetic oligonucleotide
aaggagacaaggccacuuu

SEQ ID NO: 2965 - RNA, 19 nt, Artificial Sequence
  Description of Artificial Sequence: Synthetic oligonucleotide
gaaggagacaaggccacuu

SEQ ID NO: 2966 - RNA, 19 nt, Artificial Sequence
  Description of Artificial Sequence: Synthetic oligonucleotide
agaaggagacaaggccacu

SEQ ID NO: 2967 - RNA, 19 nt, Artificial Sequence
  Description of Artificial Sequence: Synthetic oligonucleotide
uagaaggagacaaggccac

SEQ ID NO: 2968 - RNA, 19 nt, Artificial Sequence
  Description of Artificial Sequence: Synthetic oligonucleotide
guagaaggagacaaggcca

SEQ ID NO: 2969 - RNA, 19 nt, Artificial Sequence
  Description of Artificial Sequence: Synthetic oligonucleotide
gguagaaggagacaaggcc

SEQ ID NO: 2970 - RNA, 19 nt, Artificial Sequence
  Description of Artificial Sequence: Synthetic oligonucleotide
cgguagaaggagacaaggc

SEQ ID NO: 2971 - RNA, 19 nt, Artificial Sequence
  Description of Artificial Sequence: Synthetic oligonucleotide
ccgguagaaggagacaagg

SEQ ID NO: 2972 - RNA, 19 nt, Artificial Sequence
  Description of Artificial Sequence: Synthetic oligonucleotide
cccgguagaaggagacaag

SEQ ID NO: 2973 - RNA, 19 nt, Artificial Sequence
  Description of Artificial Sequence: Synthetic oligonucleotide
ucccgguagaaggagacaa

SEQ ID NO: 2974 - RNA, 19 nt, Artificial Sequence
  Description of Artificial Sequence: Synthetic oligonucleotide
gucccgguagaaggagaca

SEQ ID NO: 2975 - RNA, 19 nt, Artificial Sequence
  Description of Artificial Sequence: Synthetic oligonucleotide
agucccgguagaaggagac

SEQ ID NO: 2976 - RNA, 19 nt, Artificial Sequence
  Description of Artificial Sequence: Synthetic oligonucleotide
cagucccgguagaaggaga

SEQ ID NO: 2977 - RNA, 19 nt, Artificial Sequence
  Description of Artificial Sequence: Synthetic oligonucleotide
ccagucccgguagaaggag

SEQ ID NO: 2978 - RNA, 19 nt, Artificial Sequence
  Description of Artificial Sequence: Synthetic oligonucleotide
uccagucccgguagaagga

SEQ ID NO: 2979 - RNA, 19 nt, Artificial Sequence
  Description of Artificial Sequence: Synthetic oligonucleotide
uuccagucccgguagaagg

SEQ ID NO: 2980 - RNA, 19 nt, Artificial Sequence
  Description of Artificial Sequence: Synthetic oligonucleotide
cuuccagucccgguagaag

SEQ ID NO: 2981 - RNA, 19 nt, Artificial Sequence
  Description of Artificial Sequence: Synthetic oligonucleotide
gcuuccagucccgguagaa

SEQ ID NO: 2982 - RNA, 19 nt, Artificial Sequence
  Description of Artificial Sequence: Synthetic oligonucleotide
ugcuuccagucccgguaga

SEQ ID NO: 2983 - RNA, 19 nt, Artificial Sequence
  Description of Artificial Sequence: Synthetic oligonucleotide
cugcuuccagucccgguag

SEQ ID NO: 2984 - RNA, 19 nt, Artificial Sequence
  Description of Artificial Sequence: Synthetic oligonucleotide
acugcuuccagucccggua

SEQ ID NO: 2985 - RNA, 19 nt, Artificial Sequence
  Description of Artificial Sequence: Synthetic oligonucleotide
uacugcuuccagucccggu

SEQ ID NO: 2986 - RNA, 19 nt, Artificial Sequence
  Description of Artificial Sequence: Synthetic oligonucleotide
guacugcuuccagucccgg

SEQ ID NO: 2987 - RNA, 19 nt, Artificial Sequence
  Description of Artificial Sequence: Synthetic oligonucleotide
uguacugcuuccagucccg

SEQ ID NO: 2988 - RNA, 19 nt, Artificial Sequence
  Description of Artificial Sequence: Synthetic oligonucleotide
uuguacugcuuccaguccc

SEQ ID NO: 2989 - RNA, 19 nt, Artificial Sequence
  Description of Artificial Sequence: Synthetic oligonucleotide
cuuguacugcuuccagucc

SEQ ID NO: 2990 - RNA, 19 nt, Artificial Sequence
  Description of Artificial Sequence: Synthetic oligonucleotide
gcuuguacugcuuccaguc

SEQ ID NO: 2991 - RNA, 19 nt, Artificial Sequence
  Description of Artificial Sequence: Synthetic oligonucleotide
ugcuuguacugcuuccagu

SEQ ID NO: 2992 - RNA, 19 nt, Artificial Sequence
  Description of Artificial Sequence: Synthetic oligonucleotide
cugcuuguacugcuuccag

SEQ ID NO: 2993 - RNA, 19 nt, Artificial Sequence
  Description of Artificial Sequence: Synthetic oligonucleotide
ccugcuuguacugcuucca

SEQ ID NO: 2994 - RNA, 19 nt, Artificial Sequence
  Description of Artificial Sequence: Synthetic oligonucleotide
cccugcuuguacugcuucc

SEQ ID NO: 2995 - RNA, 19 nt, Artificial Sequence
  Description of Artificial Sequence: Synthetic oligonucleotide
gcccugcuuguacugcuuc

SEQ ID NO: 2996 - RNA, 19 nt, Artificial Sequence
  Description of Artificial Sequence: Synthetic oligonucleotide
agcccugcuuguacugcuu

SEQ ID NO: 2997 - RNA, 19 nt, Artificial Sequence
  Description of Artificial Sequence: Synthetic oligonucleotide
aagcccugcuuguacugcu

SEQ ID NO: 2998 - RNA, 19 nt, Artificial Sequence
  Description of Artificial Sequence: Synthetic oligonucleotide
aaagcccugcuuguacugc

SEQ ID NO: 2999 - RNA, 19 nt, Artificial Sequence
  Description of Artificial Sequence: Synthetic oligonucleotide
caaagcccugcuuguacug

SEQ ID NO: 3000 - RNA, 19 nt, Artificial Sequence
  Description of Artificial Sequence: Synthetic oligonucleotide
ccaaagcccugcuuguacu

SEQ ID NO: 3001 - RNA, 19 nt, Artificial Sequence
  Description of Artificial Sequence: Synthetic oligonucleotide
gccaaagcccugcuuguac

SEQ ID NO: 3002 - RNA, 19 nt, Artificial Sequence
  Description of Artificial Sequence: Synthetic oligonucleotide
ugccaaagcccugcuugua

SEQ ID NO: 3003 - RNA, 19 nt, Artificial Sequence
  Description of Artificial Sequence: Synthetic oligonucleotide
cugccaaagcccugcuugu

SEQ ID NO: 3004 - RNA, 19 nt, Artificial Sequence
  Description of Artificial Sequence: Synthetic oligonucleotide
gcugccaaagcccugcuug

SEQ ID NO: 3005 - RNA, 19 nt, Artificial Sequence
  Description of Artificial Sequence: Synthetic oligonucleotide
ugcugccaaagcccugcuu

SEQ ID NO: 3006 - RNA, 19 nt, Artificial Sequence
  Description of Artificial Sequence: Synthetic oligonucleotide
augcugccaaagcccugcu

SEQ ID NO: 3007 - RNA, 19 nt, Artificial Sequence
  Description of Artificial Sequence: Synthetic oligonucleotide
gaugcugccaaagcccugc

SEQ ID NO: 3008 - RNA, 19 nt, Artificial Sequence
  Description of Artificial Sequence: Synthetic oligonucleotide
ggaugcugccaaagcccug

SEQ ID NO: 3009 - RNA, 19 nt, Artificial Sequence
  Description of Artificial Sequence: Synthetic oligonucleotide
cggaugcugccaaagcccu

SEQ ID NO: 3010 - RNA, 19 nt, Artificial Sequence
  Description of Artificial Sequence: Synthetic oligonucleotide
acggaugcugccaaagccc

SEQ ID NO: 3011 - RNA, 19 nt, Artificial Sequence
  Description of Artificial Sequence: Synthetic oligonucleotide
cacggaugcugccaaagcc

SEQ ID NO: 3012 - RNA, 19 nt, Artificial Sequence
  Description of Artificial Sequence: Synthetic oligonucleotide
ccacggaugcugccaaagc

SEQ ID NO: 3013 - RNA, 19 nt, Artificial Sequence
  Description of Artificial Sequence: Synthetic oligonucleotide
cccacggaugcugccaaag

SEQ ID NO: 3014 - RNA, 19 nt, Artificial Sequence
  Description of Artificial Sequence: Synthetic oligonucleotide
ccccacggaugcugccaaa

SEQ ID NO: 3015 - RNA, 19 nt, Artificial Sequence
  Description of Artificial Sequence: Synthetic oligonucleotide
uccccacggaugcugccaa

SEQ ID NO: 3016 - RNA, 19 nt, Artificial Sequence
  Description of Artificial Sequence: Synthetic oligonucleotide
guccccacggaugcugcca

SEQ ID NO: 3017 - RNA, 19 nt, Artificial Sequence
  Description of Artificial Sequence: Synthetic oligonucleotide
aguccccacggaugcugcc

SEQ ID NO: 3018 - RNA, 19 nt, Artificial Sequence
  Description of Artificial Sequence: Synthetic oligonucleotide
aaguccccacggaugcugc

SEQ ID NO: 3019 - RNA, 19 nt, Artificial Sequence
  Description of Artificial Sequence: Synthetic oligonucleotide
gaaguccccacggaugcug

SEQ ID NO: 3020 - RNA, 19 nt, Artificial Sequence
  Description of Artificial Sequence: Synthetic oligonucleotide
agaaguccccacggaugcu

SEQ ID NO: 3021 - RNA, 19 nt, Artificial Sequence
  Description of Artificial Sequence: Synthetic oligonucleotide
cagaaguccccacggaugc

SEQ ID NO: 3022 - RNA, 19 nt, Artificial Sequence
  Description of Artificial Sequence: Synthetic oligonucleotide
ccagaaguccccacggaug

SEQ ID NO: 3023 - RNA, 19 nt, Artificial Sequence
  Description of Artificial Sequence: Synthetic oligonucleotide
gccagaaguccccacggau

SEQ ID NO: 3024 - RNA, 19 nt, Artificial Sequence
  Description of Artificial Sequence: Synthetic oligonucleotide
agccagaaguccccacgga

SEQ ID NO: 3025 - RNA, 19 nt, Artificial Sequence
  Description of Artificial Sequence: Synthetic oligonucleotide
cagccagaaguccccacgg

SEQ ID NO: 3026 - RNA, 19 nt, Artificial Sequence
  Description of Artificial Sequence: Synthetic oligonucleotide
ccagccagaaguccccacg

SEQ ID NO: 3027 - RNA, 19 nt, Artificial Sequence
  Description of Artificial Sequence: Synthetic oligonucleotide
cccagccagaaguccccac

SEQ ID NO: 3028 - RNA, 19 nt, Artificial Sequence
  Description of Artificial Sequence: Synthetic oligonucleotide
ccccagccagaagucccca

SEQ ID NO: 3029 - RNA, 19 nt, Artificial Sequence
  Description of Artificial Sequence: Synthetic oligonucleotide
uccccagccagaagucccc

SEQ ID NO: 3030 - RNA, 19 nt, Artificial Sequence
  Description of Artificial Sequence: Synthetic oligonucleotide
uuccccagccagaaguccc

SEQ ID NO: 3031 - RNA, 19 nt, Artificial Sequence
  Description of Artificial Sequence: Synthetic oligonucleotide
guuccccagccagaagucc

SEQ ID NO: 3032 - RNA, 19 nt, Artificial Sequence
  Description of Artificial Sequence: Synthetic oligonucleotide
cguuccccagccagaaguc

SEQ ID NO: 3033 - RNA, 19 nt, Artificial Sequence
  Description of Artificial Sequence: Synthetic oligonucleotide
ucguuccccagccagaagu

SEQ ID NO: 3034 - RNA, 19 nt, Artificial Sequence
  Description of Artificial Sequence: Synthetic oligonucleotide
uucguuccccagccagaag

SEQ ID NO: 3035 - RNA, 19 nt, Artificial Sequence
  Description of Artificial Sequence: Synthetic oligonucleotide
guucguuccccagccagaa

SEQ ID NO: 3036 - RNA, 19 nt, Artificial Sequence
  Description of Artificial Sequence: Synthetic oligonucleotide
uguucguuccccagccaga

SEQ ID NO: 3037 - RNA, 19 nt, Artificial Sequence
  Description of Artificial Sequence: Synthetic oligonucleotide
guguucguuccccagccag

SEQ ID NO: 3038 - RNA, 19 nt, Artificial Sequence
  Description of Artificial Sequence: Synthetic oligonucleotide
uguguucguuccccagcca

SEQ ID NO: 3039 - RNA, 19 nt, Artificial Sequence
  Description of Artificial Sequence: Synthetic oligonucleotide
auguguucguuccccagcc

SEQ ID NO: 3040 - RNA, 19 nt, Artificial Sequence
  Description of Artificial Sequence: Synthetic oligonucleotide
gauguguucguuccccagc

SEQ ID NO: 3041 - RNA, 19 nt, Artificial Sequence
  Description of Artificial Sequence: Synthetic oligonucleotide
ggauguguucguuccccag

SEQ ID NO: 3042 - RNA, 19 nt, Artificial Sequence
  Description of Artificial Sequence: Synthetic oligonucleotide
uggauguguucguucccca

SEQ ID NO: 3043 - RNA, 19 nt, Artificial Sequence
  Description of Artificial Sequence: Synthetic oligonucleotide
guggauguguucguucccc

SEQ ID NO: 3044 - RNA, 19 nt, Artificial Sequence
  Description of Artificial Sequence: Synthetic oligonucleotide
gguggauguguucguuccc

SEQ ID NO: 3045 - RNA, 19 nt, Artificial Sequence
  Description of Artificial Sequence: Synthetic oligonucleotide
cgguggauguguucguucc

SEQ ID NO: 3046 - RNA, 19 nt, Artificial Sequence
  Description of Artificial Sequence: Synthetic oligonucleotide
ccgguggauguguucguuc

SEQ ID NO: 3047 - RNA, 19 nt, Artificial Sequence
  Description of Artificial Sequence: Synthetic oligonucleotide
gccgguggauguguucguu

SEQ ID NO: 3048 - RNA, 19 nt, Artificial Sequence
  Description of Artificial Sequence: Synthetic oligonucleotide
agccgguggauguguucgu

SEQ ID NO: 3049 - RNA, 19 nt, Artificial Sequence
  Description of Artificial Sequence: Synthetic oligonucleotide
gagccgguggauguguucg

SEQ ID NO: 3050 - RNA, 19 nt, Artificial Sequence
  Description of Artificial Sequence: Synthetic oligonucleotide
agagccgguggauguguuc

SEQ ID NO: 3051 - RNA, 19 nt, Artificial Sequence
  Description of Artificial Sequence: Synthetic oligonucleotide
gagagccgguggauguguu

SEQ ID NO: 3052 - RNA, 19 nt, Artificial Sequence
  Description of Artificial Sequence: Synthetic oligonucleotide
ggagagccgguggaugugu

SEQ ID NO: 3053 - RNA, 19 nt, Artificial Sequence
  Description of Artificial Sequence: Synthetic oligonucleotide
uggagagccgguggaugug

SEQ ID NO: 3054 - RNA, 19 nt, Artificial Sequence
  Description of Artificial Sequence: Synthetic oligonucleotide
cuggagagccgguggaugu

SEQ ID NO: 3055 - RNA, 19 nt, Artificial Sequence
  Description of Artificial Sequence: Synthetic oligonucleotide
ucuggagagccgguggaug

SEQ ID NO: 3056 - RNA, 19 nt, Artificial Sequence
  Description of Artificial Sequence: Synthetic oligonucleotide
gucuggagagccgguggau

SEQ ID NO: 3057 - RNA, 19 nt, Artificial Sequence
  Description of Artificial Sequence: Synthetic oligonucleotide
ugucuggagagccggugga

SEQ ID NO: 3058 - RNA, 19 nt, Artificial Sequence
  Description of Artificial Sequence: Synthetic oligonucleotide
cugucuggagagccggugg

SEQ ID NO: 3059 - RNA, 19 nt, Artificial Sequence
  Description of Artificial Sequence: Synthetic oligonucleotide
gcugucuggagagccggug

SEQ ID NO: 3060 - RNA, 19 nt, Artificial Sequence
  Description of Artificial Sequence: Synthetic oligonucleotide
ggcugucuggagagccggu

SEQ ID NO: 3061 - RNA, 19 nt, Artificial Sequence
  Description of Artificial Sequence: Synthetic oligonucleotide
uggcugucuggagagccgg

SEQ ID NO: 3062 - RNA, 19 nt, Artificial Sequence
  Description of Artificial Sequence: Synthetic oligonucleotide
uuggcugucuggagagccg

SEQ ID NO: 3063 - RNA, 19 nt, Artificial Sequence
  Description of Artificial Sequence: Synthetic oligonucleotide
guuggcugucuggagagcc

SEQ ID NO: 3064 - RNA, 19 nt, Artificial Sequence
  Description of Artificial Sequence: Synthetic oligonucleotide
gguuggcugucuggagagc

SEQ ID NO: 3065 - RNA, 19 nt, Artificial Sequence
  Description of Artificial Sequence: Synthetic oligonucleotide
ggguuggcugucuggagag

SEQ ID NO: 3066 - RNA, 19 nt, Artificial Sequence
  Description of Artificial Sequence: Synthetic oligonucleotide
cggguuggcugucuggaga

SEQ ID NO: 3067 - RNA, 19 nt, Artificial Sequence
  Description of Artificial Sequence: Synthetic oligonucleotide
ccggguuggcugucuggag

SEQ ID NO: 3068 - RNA, 19 nt, Artificial Sequence
  Description of Artificial Sequence: Synthetic oligonucleotide
gccggguuggcugucugga

SEQ ID NO: 3069 - RNA, 19 nt, Artificial Sequence
  Description of Artificial Sequence: Synthetic oligonucleotide
agccggguuggcugucugg

SEQ ID NO: 3070 - RNA, 19 nt, Artificial Sequence
  Description of Artificial Sequence: Synthetic oligonucleotide
cagccggguuggcugucug

SEQ ID NO: 3071 - RNA, 19 nt, Artificial Sequence
  Description of Artificial Sequence: Synthetic oligonucleotide
gcagccggguuggcugucu

SEQ ID NO: 3072 - RNA, 19 nt, Artificial Sequence
  Description of Artificial Sequence: Synthetic oligonucleotide
cgcagccggguuggcuguc

SEQ ID NO: 3073 - RNA, 19 nt, Artificial Sequence
  Description of Artificial Sequence: Synthetic oligonucleotide
acgcagccggguuggcugu

SEQ ID NO: 3074 - RNA, 19 nt, Artificial Sequence
  Description of Artificial Sequence: Synthetic oligonucleotide
cacgcagccggguuggcug

SEQ ID NO: 3075 - RNA, 19 nt, Artificial Sequence
  Description of Artificial Sequence: Synthetic oligonucleotide
acacgcagccggguuggcu

SEQ ID NO: 3076 - RNA, 19 nt, Artificial Sequence
  Description of Artificial Sequence: Synthetic oligonucleotide
uacacgcagccggguuggc

SEQ ID NO: 3077 - RNA, 19 nt, Artificial Sequence
  Description of Artificial Sequence: Synthetic oligonucleotide
cuacacgcagccggguugg

SEQ ID NO: 3078 - RNA, 19 nt, Artificial Sequence
  Description of Artificial Sequence: Synthetic oligonucleotide
ucuacacgcagccggguug

SEQ ID NO: 3079 - RNA, 19 nt, Artificial Sequence
  Description of Artificial Sequence: Synthetic oligonucleotide
cucuacacgcagccggguu

SEQ ID NO: 3080 - RNA, 19 nt, Artificial Sequence
  Description of Artificial Sequence: Synthetic oligonucleotide
ucucuacacgcagccgggu

SEQ ID NO: 3081 - RNA, 19 nt, Artificial Sequence
  Description of Artificial Sequence: Synthetic oligonucleotide
aucucuacacgcagccggg

SEQ ID NO: 3082 - RNA, 19 nt, Artificial Sequence
  Description of Artificial Sequence: Synthetic oligonucleotide
caucucuacacgcagccgg

SEQ ID NO: 3083 - RNA, 19 nt, Artificial Sequence
  Description of Artificial Sequence: Synthetic oligonucleotide
ccaucucuacacgcagccg

SEQ ID NO: 3084 - RNA, 19 nt, Artificial Sequence
  Description of Artificial Sequence: Synthetic oligonucleotide
uccaucucuacacgcagcc

SEQ ID NO: 3085 - RNA, 19 nt, Artificial Sequence
  Description of Artificial Sequence: Synthetic oligonucleotide
cuccaucucuacacgcagc

SEQ ID NO: 3086 - RNA, 19 nt, Artificial Sequence
  Description of Artificial Sequence: Synthetic oligonucleotide
ccuccaucucuacacgcag

SEQ ID NO: 3087 - RNA, 19 nt, Artificial Sequence
  Description of Artificial Sequence: Synthetic oligonucleotide
uccuccaucucuacacgca

SEQ ID NO: 3088 - RNA, 19 nt, Artificial Sequence
  Description of Artificial Sequence: Synthetic oligonucleotide
guccuccaucucuacacgc

SEQ ID NO: 3089 - RNA, 19 nt, Artificial Sequence
  Description of Artificial Sequence: Synthetic oligonucleotide
aguccuccaucucuacacg

SEQ ID NO: 3090 - RNA, 19 nt, Artificial Sequence
  Description of Artificial Sequence: Synthetic oligonucleotide
caguccuccaucucuacac

SEQ ID NO: 3091 - RNA, 19 nt, Artificial Sequence
  Description of Artificial Sequence: Synthetic oligonucleotide
ccaguccuccaucucuaca

SEQ ID NO: 3092 - RNA, 19 nt, Artificial Sequence
  Description of Artificial Sequence: Synthetic oligonucleotide
cccaguccuccaucucuac

SEQ ID NO: 3093 - RNA, 19 nt, Artificial Sequence
  Description of Artificial Sequence: Synthetic oligonucleotide
ucccaguccuccaucucua

SEQ ID NO: 3094 - RNA, 19 nt, Artificial Sequence
  Description of Artificial Sequence: Synthetic oligonucleotide
cucccaguccuccaucucu

SEQ ID NO: 3095 - RNA, 19 nt, Artificial Sequence
  Description of Artificial Sequence: Synthetic oligonucleotide
ccucccaguccuccaucuc

SEQ ID NO: 3096 - RNA, 19 nt, Artificial Sequence
  Description of Artificial Sequence: Synthetic oligonucleotide
cccucccaguccuccaucu

SEQ ID NO: 3097 - RNA, 19 nt, Artificial Sequence
  Description of Artificial Sequence: Synthetic oligonucleotide
gcccucccaguccuccauc

SEQ ID NO: 3098 - RNA, 19 nt, Artificial Sequence
  Description of Artificial Sequence: Synthetic oligonucleotide
ugcccucccaguccuccau

SEQ ID NO: 3099 - RNA, 19 nt, Artificial Sequence
  Description of Artificial Sequence: Synthetic oligonucleotide
uugcccucccaguccucca

SEQ ID NO: 3100 - RNA, 19 nt, Artificial Sequence
  Description of Artificial Sequence: Synthetic oligonucleotide
guugcccucccaguccucc

SEQ ID NO: 3101 - RNA, 19 nt, Artificial Sequence
  Description of Artificial Sequence: Synthetic oligonucleotide
gguugcccucccaguccuc

SEQ ID NO: 3102 - RNA, 19 nt, Artificial Sequence
  Description of Artificial Sequence: Synthetic oligonucleotide
agguugcccucccaguccu

SEQ ID NO: 3103 - RNA, 19 nt, Artificial Sequence
  Description of Artificial Sequence: Synthetic oligonucleotide
cagguugcccucccagucc

SEQ ID NO: 3104 - RNA, 19 nt, Artificial Sequence
  Description of Artificial Sequence: Synthetic oligonucleotide
gcagguugcccucccaguc

SEQ ID NO: 3105 - RNA, 19 nt, Artificial Sequence
  Description of Artificial Sequence: Synthetic oligonucleotide
cgcagguugcccucccagu

SEQ ID NO: 3106 - RNA, 19 nt, Artificial Sequence
  Description of Artificial Sequence: Synthetic oligonucleotide
gcgcagguugcccucccag

SEQ ID NO: 3107 - RNA, 19 nt, Artificial Sequence
  Description of Artificial Sequence: Synthetic oligonucleotide
agcgcagguugcccuccca

SEQ ID NO: 3108 - RNA, 19 nt, Artificial Sequence
  Description of Artificial Sequence: Synthetic oligonucleotide
uagcgcagguugcccuccc

SEQ ID NO: 3109 - RNA, 19 nt, Artificial Sequence
  Description of Artificial Sequence: Synthetic oligonucleotide
guagcgcagguugcccucc

SEQ ID NO: 3110 - RNA, 19 nt, Artificial Sequence
  Description of Artificial Sequence: Synthetic oligonucleotide
cguagcgcagguugcccuc

SEQ ID NO: 3111 - RNA, 19 nt, Artificial Sequence
  Description of Artificial Sequence: Synthetic oligonucleotide
gcguagcgcagguugcccu

SEQ ID NO: 3112 - RNA, 19 nt, Artificial Sequence
  Description of Artificial Sequence: Synthetic oligonucleotide
agcguagcgcagguugccc

SEQ ID NO: 3113 - RNA, 19 nt, Artificial Sequence
  Description of Artificial Sequence: Synthetic oligonucleotide
cagcguagcgcagguugcc

SEQ ID NO: 3114 - RNA, 19 nt, Artificial Sequence
  Description of Artificial Sequence: Synthetic oligonucleotide
ucagcguagcgcagguugc

SEQ ID NO: 3115 - RNA, 19 nt, Artificial Sequence
  Description of Artificial Sequence: Synthetic oligonucleotide
cucagcguagcgcagguug

SEQ ID NO: 3116 - RNA, 19 nt, Artificial Sequence
  Description of Artificial Sequence: Synthetic oligonucleotide
acucagcguagcgcagguu

SEQ ID NO: 3117 - RNA, 19 nt, Artificial Sequence
  Description of Artificial Sequence: Synthetic oligonucleotide
uacucagcguagcgcaggu

SEQ ID NO: 3118 - RNA, 19 nt, Artificial Sequence
  Description of Artificial Sequence: Synthetic oligonucleotide
auacucagcguagcgcagg

SEQ ID NO: 3119 - RNA, 19 nt, Artificial Sequence
  Description of Artificial Sequence: Synthetic oligonucleotide
uauacucagcguagcgcag

SEQ ID NO: 3120 - RNA, 19 nt, Artificial Sequence
  Description of Artificial Sequence: Synthetic oligonucleotide
cuauacucagcguagcgca

SEQ ID NO: 3121 - RNA, 19 nt, Artificial Sequence
  Description of Artificial Sequence: Synthetic oligonucleotide
gcuauacucagcguagcgc

SEQ ID NO: 3122 - RNA, 19 nt, Artificial Sequence
  Description of Artificial Sequence: Synthetic oligonucleotide
ggcuauacucagcguagcg

SEQ ID NO: 3123 - RNA, 19 nt, Artificial Sequence
  Description of Artificial Sequence: Synthetic oligonucleotide
uggcuauacucagcguagc

SEQ ID NO: 3124 - RNA, 19 nt, Artificial Sequence
  Description of Artificial Sequence: Synthetic oligonucleotide
guggcuauacucagcguag

SEQ ID NO: 3125 - RNA, 19 nt, Artificial Sequence
  Description of Artificial Sequence: Synthetic oligonucleotide
aguggcuauacucagcgua

SEQ ID NO: 3126 - RNA, 19 nt, Artificial Sequence
  Description of Artificial Sequence: Synthetic oligonucleotide
aaguggcuauacucagcgu

SEQ ID NO: 3127 - RNA, 19 nt, Artificial Sequence
  Description of Artificial Sequence: Synthetic oligonucleotide
aaaguggcuauacucagcg

SEQ ID NO: 3128 - RNA, 19 nt, Artificial Sequence
  Description of Artificial Sequence: Synthetic oligonucleotide
caaaguggcuauacucagc

SEQ ID NO: 3129 - RNA, 19 nt, Artificial Sequence
  Description of Artificial Sequence: Synthetic oligonucleotide
acaaaguggcuauacucag

SEQ ID NO: 3130 - RNA, 19 nt, Artificial Sequence
  Description of Artificial Sequence: Synthetic oligonucleotide
aacaaaguggcuauacuca

SEQ ID NO: 3131 - RNA, 19 nt, Artificial Sequence
  Description of Artificial Sequence: Synthetic oligonucleotide
aaacaaaguggcuauacuc

SEQ ID NO: 3132 - RNA, 19 nt, Artificial Sequence
  Description of Artificial Sequence: Synthetic oligonucleotide
aaaacaaaguggcuauacu

SEQ ID NO: 3133 - RNA, 19 nt, Artificial Sequence
  Description of Artificial Sequence: Synthetic oligonucleotide
caaaacaaaguggcuauac

SEQ ID NO: 3134 - RNA, 19 nt, Artificial Sequence
  Description of Artificial Sequence: Synthetic oligonucleotide
ccaaaacaaaguggcuaua

SEQ ID NO: 3135 - RNA, 19 nt, Artificial Sequence
  Description of Artificial Sequence: Synthetic oligonucleotide
cccaaaacaaaguggcuau

SEQ ID NO: 3136 - RNA, 19 nt, Artificial Sequence
  Description of Artificial Sequence: Synthetic oligonucleotide
gcccaaaacaaaguggcua

SEQ ID NO: 3137 - RNA, 19 nt, Artificial Sequence
  Description of Artificial Sequence: Synthetic oligonucleotide
ugcccaaaacaaaguggcu

SEQ ID NO: 3138 - RNA, 19 nt, Artificial Sequence
  Description of Artificial Sequence: Synthetic oligonucleotide
uugcccaaaacaaaguggc

SEQ ID NO: 3139 - RNA, 19 nt, Artificial Sequence
  Description of Artificial Sequence: Synthetic oligonucleotide
auugcccaaaacaaagugg

SEQ ID NO: 3140 - RNA, 19 nt, Artificial Sequence
  Description of Artificial Sequence: Synthetic oligonucleotide
cauugcccaaaacaaagug

SEQ ID NO: 3141 - RNA, 19 nt, Artificial Sequence
  Description of Artificial Sequence: Synthetic oligonucleotide
ucauugcccaaaacaaagu

SEQ ID NO: 3142 - RNA, 19 nt, Artificial Sequence
  Description of Artificial Sequence: Synthetic oligonucleotide
uucauugcccaaaacaaag

SEQ ID NO: 3143 - RNA, 19 nt, Artificial Sequence
  Description of Artificial Sequence: Synthetic oligonucleotide
guucauugcccaaaacaaa

SEQ ID NO: 3144 - RNA, 19 nt, Artificial Sequence
  Description of Artificial Sequence: Synthetic oligonucleotide
aguucauugcccaaaacaa

SEQ ID NO: 3145 - RNA, 19 nt, Artificial Sequence
  Description of Artificial Sequence: Synthetic oligonucleotide
gaguucauugcccaaaaca

SEQ ID NO: 3146 - RNA, 19 nt, Artificial Sequence
  Description of Artificial Sequence: Synthetic oligonucleotide
ugaguucauugcccaaaac

SEQ ID NO: 3147 - RNA, 19 nt, Artificial Sequence
  Description of Artificial Sequence: Synthetic oligonucleotide
uugaguucauugcccaaaa

SEQ ID NO: 3148 - RNA, 19 nt, Artificial Sequence
  Description of Artificial Sequence: Synthetic oligonucleotide
guugaguucauugcccaaa

SEQ ID NO: 3149 - RNA, 19 nt, Artificial Sequence
  Description of Artificial Sequence: Synthetic oligonucleotide
uguugaguucauugcccaa

SEQ ID NO: 3150 - RNA, 19 nt, Artificial Sequence
  Description of Artificial Sequence: Synthetic oligonucleotide
cuguugaguucauugccca

SEQ ID NO: 3151 - RNA, 19 nt, Artificial Sequence
  Description of Artificial Sequence: Synthetic oligonucleotide
gcuguugaguucauugccc

SEQ ID NO: 3152 - RNA, 19 nt, Artificial Sequence
  Description of Artificial Sequence: Synthetic oligonucleotide
agcuguugaguucauugcc

SEQ ID NO: 3153 - RNA, 19 nt, Artificial Sequence
  Description of Artificial Sequence: Synthetic oligonucleotide
uagcuguugaguucauugc

SEQ ID NO: 3154 - RNA, 19 nt, Artificial Sequence
  Description of Artificial Sequence: Synthetic oligonucleotide
auagcuguugaguucauug

SEQ ID NO: 3155 - RNA, 19 nt, Artificial Sequence
  Description of Artificial Sequence: Synthetic oligonucleotide
gauagcuguugaguucauu

SEQ ID NO: 3156 - RNA, 19 nt, Artificial Sequence
  Description of Artificial Sequence: Synthetic oligonucleotide
cgauagcuguugaguucau

SEQ ID NO: 3157 - RNA, 19 nt, Artificial Sequence
  Description of Artificial Sequence: Synthetic oligonucleotide
gcgauagcuguugaguuca

SEQ ID NO: 3158 - RNA, 19 nt, Artificial Sequence
  Description of Artificial Sequence: Synthetic oligonucleotide
ggcgauagcuguugaguuc

SEQ ID NO: 3159 - RNA, 19 nt, Artificial Sequence
  Description of Artificial Sequence: Synthetic oligonucleotide
aggcgauagcuguugaguu

SEQ ID NO: 3160 - RNA, 19 nt, Artificial Sequence
  Description of Artificial Sequence: Synthetic oligonucleotide
gaggcgauagcuguugagu

SEQ ID NO: 3161 - RNA, 19 nt, Artificial Sequence
  Description of Artificial Sequence: Synthetic oligonucleotide
agaggcgauagcuguugag

SEQ ID NO: 3162 - RNA, 19 nt, Artificial Sequence
  Description of Artificial Sequence: Synthetic oligonucleotide
aagaggcgauagcuguuga

SEQ ID NO: 3163 - RNA, 19 nt, Artificial Sequence
  Description of Artificial Sequence: Synthetic oligonucleotide
gaagaggcgauagcuguug

SEQ ID NO: 3164 - RNA, 19 nt, Artificial Sequence
  Description of Artificial Sequence: Synthetic oligonucleotide
ggaagaggcgauagcuguu

SEQ ID NO: 3165 - RNA, 19 nt, Artificial Sequence
  Description of Artificial Sequence: Synthetic oligonucleotide
aggaagaggcgauagcugu

SEQ ID NO: 3166 - RNA, 19 nt, Artificial Sequence
  Description of Artificial Sequence: Synthetic oligonucleotide
caggaagaggcgauagcug

SEQ ID NO: 3167 - RNA, 19 nt, Artificial Sequence
  Description of Artificial Sequence: Synthetic oligonucleotide
ccaggaagaggcgauagcu

SEQ ID NO: 3168 - RNA, 19 nt, Artificial Sequence
  Description of Artificial Sequence: Synthetic oligonucleotide
cccaggaagaggcgauagc

SEQ ID NO: 3169 - RNA, 19 nt, Artificial Sequence
  Description of Artificial Sequence: Synthetic oligonucleotide
ccccaggaagaggcgauag

SEQ ID NO: 3170 - RNA, 19 nt, Artificial Sequence
  Description of Artificial Sequence: Synthetic oligonucleotide
uccccaggaagaggcgaua

SEQ ID NO: 3171 - RNA, 19 nt, Artificial Sequence
  Description of Artificial Sequence: Synthetic oligonucleotide
uuccccaggaagaggcgau

SEQ ID NO: 3172 - RNA, 19 nt, Artificial Sequence
  Description of Artificial Sequence: Synthetic oligonucleotide
guuccccaggaagaggcga

SEQ ID NO: 3173 - RNA, 19 nt, Artificial Sequence
  Description of Artificial Sequence: Synthetic oligonucleotide
aguuccccaggaagaggcg

SEQ ID NO: 3174 - RNA, 19 nt, Artificial Sequence
  Description of Artificial Sequence: Synthetic oligonucleotide
uaguuccccaggaagaggc

SEQ ID NO: 3175 - RNA, 19 nt, Artificial Sequence
  Description of Artificial Sequence: Synthetic oligonucleotide
guaguuccccaggaagagg

SEQ ID NO: 3176 - RNA, 19 nt, Artificial Sequence
  Description of Artificial Sequence: Synthetic oligonucleotide
uguaguuccccaggaagag

SEQ ID NO: 3177 - RNA, 19 nt, Artificial Sequence
  Description of Artificial Sequence: Synthetic oligonucleotide
guguaguuccccaggaaga

SEQ ID NO: 3178 - RNA, 19 nt, Artificial Sequence
  Description of Artificial Sequence: Synthetic oligonucleotide
aguguaguuccccaggaag

SEQ ID NO: 3179 - RNA, 19 nt, Artificial Sequence
  Description of Artificial Sequence: Synthetic oligonucleotide
caguguaguuccccaggaa

SEQ ID NO: 3180 - RNA, 19 nt, Artificial Sequence
  Description of Artificial Sequence: Synthetic oligonucleotide
ccaguguaguuccccagga

SEQ ID NO: 3181 - RNA, 19 nt, Artificial Sequence
  Description of Artificial Sequence: Synthetic oligonucleotide
gccaguguaguuccccagg

SEQ ID NO: 3182 - RNA, 19 nt, Artificial Sequence
  Description of Artificial Sequence: Synthetic oligonucleotide
ugccaguguaguuccccag

SEQ ID NO: 3183 - RNA, 19 nt, Artificial Sequence
  Description of Artificial Sequence: Synthetic oligonucleotide
uugccaguguaguucccca

SEQ ID NO: 3184 - RNA, 19 nt, Artificial Sequence
  Description of Artificial Sequence: Synthetic oligonucleotide
auugccaguguaguucccc

SEQ ID NO: 3185 - RNA, 19 nt, Artificial Sequence
  Description of Artificial Sequence: Synthetic oligonucleotide
cauugccaguguaguuccc

SEQ ID NO: 3186 - RNA, 19 nt, Artificial Sequence
  Description of Artificial Sequence: Synthetic oligonucleotide
acauugccaguguaguucc

SEQ ID NO: 3187 - RNA, 19 nt, Artificial Sequence
  Description of Artificial Sequence: Synthetic oligonucleotide
cacauugccaguguaguuc

SEQ ID NO: 3188 - RNA, 19 nt, Artificial Sequence
  Description of Artificial Sequence: Synthetic oligonucleotide
ccacauugccaguguaguu

SEQ ID NO: 3189 - RNA, 19 nt, Artificial Sequence
  Description of Artificial Sequence: Synthetic oligonucleotide
cccacauugccaguguagu

SEQ ID NO: 3190 - RNA, 19 nt, Artificial Sequence
  Description of Artificial Sequence: Synthetic oligonucleotide
ccccacauugccaguguag

SEQ ID NO: 3191 - RNA, 19 nt, Artificial Sequence
  Description of Artificial Sequence: Synthetic oligonucleotide
uccccacauugccagugua

SEQ ID NO: 3192 - RNA, 19 nt, Artificial Sequence
  Description of Artificial Sequence: Synthetic oligonucleotide
uuccccacauugccagugu

SEQ ID NO: 3193 - RNA, 19 nt, Artificial Sequence
  Description of Artificial Sequence: Synthetic oligonucleotide
guuccccacauugccagug

SEQ ID NO: 3194 - RNA, 19 nt, Artificial Sequence
  Description of Artificial Sequence: Synthetic oligonucleotide
cguuccccacauugccagu

SEQ ID NO: 3195 - RNA, 19 nt, Artificial Sequence
  Description of Artificial Sequence: Synthetic oligonucleotide
ucguuccccacauugccag

SEQ ID NO: 3196 - RNA, 19 nt, Artificial Sequence
  Description of Artificial Sequence: Synthetic oligonucleotide
gucguuccccacauugcca

SEQ ID NO: 3197 - RNA, 19 nt, Artificial Sequence
  Description of Artificial Sequence: Synthetic oligonucleotide
cgucguuccccacauugcc

SEQ ID NO: 3198 - RNA, 19 nt, Artificial Sequence
  Description of Artificial Sequence: Synthetic oligonucleotide
gcgucguuccccacauugc

SEQ ID NO: 3199 - RNA, 19 nt, Artificial Sequence
  Description of Artificial Sequence: Synthetic oligonucleotide
ggcgucguuccccacauug

SEQ ID NO: 3200 - RNA, 19 nt, Artificial Sequence
  Description of Artificial Sequence: Synthetic oligonucleotide
gggcgucguuccccacauu

SEQ ID NO: 3201 - RNA, 19 nt, Artificial Sequence
  Description of Artificial Sequence: Synthetic oligonucleotide
agggcgucguuccccacau

SEQ ID NO: 3202 - RNA, 19 nt, Artificial Sequence
  Description of Artificial Sequence: Synthetic oligonucleotide
gagggcgucguuccccaca

SEQ ID NO: 3203 - RNA, 19 nt, Artificial Sequence
  Description of Artificial Sequence: Synthetic oligonucleotide
ggagggcgucguuccccac

SEQ ID NO: 3204 - RNA, 19 nt, Artificial Sequence
  Description of Artificial Sequence: Synthetic oligonucleotide
uggagggcgucguucccca

SEQ ID NO: 3205 - RNA, 19 nt, Artificial Sequence
  Description of Artificial Sequence: Synthetic oligonucleotide
cuggagggcgucguucccc

SEQ ID NO: 3206 - RNA, 19 nt, Artificial Sequence
  Description of Artificial Sequence: Synthetic oligonucleotide
acuggagggcgucguuccc

SEQ ID NO: 3207 - RNA, 19 nt, Artificial Sequence
  Description of Artificial Sequence: Synthetic oligonucleotide
uacuggagggcgucguucc

SEQ ID NO: 3208 - RNA, 19 nt, Artificial Sequence
  Description of Artificial Sequence: Synthetic oligonucleotide
auacuggagggcgucguuc

SEQ ID NO: 3209 - RNA, 19 nt, Artificial Sequence
  Description of Artificial Sequence: Synthetic oligonucleotide
gauacuggagggcgucguu

SEQ ID NO: 3210 - RNA, 19 nt, Artificial Sequence
  Description of Artificial Sequence: Synthetic oligonucleotide
ugauacuggagggcgucgu

SEQ ID NO: 3211 - RNA, 19 nt, Artificial Sequence
  Description of Artificial Sequence: Synthetic oligonucleotide
augauacuggagggcgucg

SEQ ID NO: 3212 - RNA, 19 nt, Artificial Sequence
  Description of Artificial Sequence: Synthetic oligonucleotide
uaugauacuggagggcguc

SEQ ID NO: 3213 - RNA, 19 nt, Artificial Sequence
  Description of Artificial Sequence: Synthetic oligonucleotide
uuaugauacuggagggcgu

SEQ ID NO: 3214 - RNA, 19 nt, Artificial Sequence
  Description of Artificial Sequence: Synthetic oligonucleotide
guuaugauacuggagggcg

SEQ ID NO: 3215 - RNA, 19 nt, Artificial Sequence
  Description of Artificial Sequence: Synthetic oligonucleotide
uguuaugauacuggagggc

SEQ ID NO: 3216 - RNA, 19 nt, Artificial Sequence
  Description of Artificial Sequence: Synthetic oligonucleotide
uuguuaugauacuggaggg

SEQ ID NO: 3217 - RNA, 19 nt, Artificial Sequence
  Description of Artificial Sequence: Synthetic oligonucleotide
guuguuaugauacuggagg

SEQ ID NO: 3218 - RNA, 19 nt, Artificial Sequence
  Description of Artificial Sequence: Synthetic oligonucleotide
uguuguuaugauacuggag

SEQ ID NO: 3219 - RNA, 19 nt, Artificial Sequence
  Description of Artificial Sequence: Synthetic oligonucleotide
guguuguuaugauacugga

SEQ ID NO: 3220 - RNA, 19 nt, Artificial Sequence
  Description of Artificial Sequence: Synthetic oligonucleotide
uguguuguuaugauacugg

SEQ ID NO: 3221 - RNA, 19 nt, Artificial Sequence
  Description of Artificial Sequence: Synthetic oligonucleotide
cuguguuguuaugauacug

SEQ ID NO: 3222 - RNA, 19 nt, Artificial Sequence
  Description of Artificial Sequence: Synthetic oligonucleotide
gcuguguuguuaugauacu

SEQ ID NO: 3223 - RNA, 19 nt, Artificial Sequence
  Description of Artificial Sequence: Synthetic oligonucleotide
ggcuguguuguuaugauac

SEQ ID NO: 3224 - RNA, 19 nt, Artificial Sequence
  Description of Artificial Sequence: Synthetic oligonucleotide
aggcuguguuguuaugaua

SEQ ID NO: 3225 - RNA, 19 nt, Artificial Sequence
  Description of Artificial Sequence: Synthetic oligonucleotide
aaggcuguguuguuaugau

SEQ ID NO: 3226 - RNA, 19 nt, Artificial Sequence
  Description of Artificial Sequence: Synthetic oligonucleotide
gaaggcuguguuguuauga

SEQ ID NO: 3227 - RNA, 19 nt, Artificial Sequence
  Description of Artificial Sequence: Synthetic oligonucleotide
ugaaggcuguguuguuaug

SEQ ID NO: 3228 - RNA, 19 nt, Artificial Sequence
  Description of Artificial Sequence: Synthetic oligonucleotide
cugaaggcuguguuguuau

SEQ ID NO: 3229 - RNA, 19 nt, Artificial Sequence
  Description of Artificial Sequence: Synthetic oligonucleotide
gcugaaggcuguguuguua

SEQ ID NO: 3230 - RNA, 19 nt, Artificial Sequence
  Description of Artificial Sequence: Synthetic oligonucleotide
ugcugaaggcuguguuguu

SEQ ID NO: 3231 - RNA, 19 nt, Artificial Sequence
  Description of Artificial Sequence: Synthetic oligonucleotide
gugcugaaggcuguguugu

SEQ ID NO: 3232 - RNA, 19 nt, Artificial Sequence
  Description of Artificial Sequence: Synthetic oligonucleotide
ggugcugaaggcuguguug

SEQ ID NO: 3233 - RNA, 19 nt, Artificial Sequence
  Description of Artificial Sequence: Synthetic oligonucleotide
uggugcugaaggcuguguu

SEQ ID NO: 3234 - RNA, 19 nt, Artificial Sequence
  Description of Artificial Sequence: Synthetic oligonucleotide
uuggugcugaaggcugugu

SEQ ID NO: 3235 - RNA, 19 nt, Artificial Sequence
  Description of Artificial Sequence: Synthetic oligonucleotide
cuuggugcugaaggcugug

SEQ ID NO: 3236 - RNA, 19 nt, Artificial Sequence
  Description of Artificial Sequence: Synthetic oligonucleotide
ccuuggugcugaaggcugu

SEQ ID NO: 3237 - RNA, 19 nt, Artificial Sequence
  Description of Artificial Sequence: Synthetic oligonucleotide
uccuuggugcugaaggcug

SEQ ID NO: 3238 - RNA, 19 nt, Artificial Sequence
  Description of Artificial Sequence: Synthetic oligonucleotide
guccuuggugcugaaggcu

SEQ ID NO: 3239 - RNA, 19 nt, Artificial Sequence
  Description of Artificial Sequence: Synthetic oligonucleotide
uguccuuggugcugaaggc

SEQ ID NO: 3240 - RNA, 19 nt, Artificial Sequence
  Description of Artificial Sequence: Synthetic oligonucleotide
uuguccuuggugcugaagg

SEQ ID NO: 3241 - RNA, 19 nt, Artificial Sequence
  Description of Artificial Sequence: Synthetic oligonucleotide
cuuguccuuggugcugaag

SEQ ID NO: 3242 - RNA, 19 nt, Artificial Sequence
  Description of Artificial Sequence: Synthetic oligonucleotide
ccuuguccuuggugcugaa

SEQ ID NO: 3243 - RNA, 19 nt, Artificial Sequence
  Description of Artificial Sequence: Synthetic oligonucleotide
uccuuguccuuggugcuga

SEQ ID NO: 3244 - RNA, 19 nt, Artificial Sequence
  Description of Artificial Sequence: Synthetic oligonucleotide
guccuuguccuuggugcug

SEQ ID NO: 3245 - RNA, 19 nt, Artificial Sequence
  Description of Artificial Sequence: Synthetic oligonucleotide
uguccuuguccuuggugcu

SEQ ID NO: 3246 - RNA, 19 nt, Artificial Sequence
  Description of Artificial Sequence: Synthetic oligonucleotide
uuguccuuguccuuggugc

SEQ ID NO: 3247 - RNA, 19 nt, Artificial Sequence
  Description of Artificial Sequence: Synthetic oligonucleotide
auuguccuuguccuuggug

SEQ ID NO: 3248 - RNA, 19 nt, Artificial Sequence
  Description of Artificial Sequence: Synthetic oligonucleotide
cauuguccuuguccuuggu

SEQ ID NO: 3249 - RNA, 19 nt, Artificial Sequence
  Description of Artificial Sequence: Synthetic oligonucleotide
ucauuguccuuguccuugg

SEQ ID NO: 3250 - RNA, 19 nt, Artificial Sequence
  Description of Artificial Sequence: Synthetic oligonucleotide
gucauuguccuuguccuug

SEQ ID NO: 3251 - RNA, 19 nt, Artificial Sequence
  Description of Artificial Sequence: Synthetic oligonucleotide
ugucauuguccuuguccuu

SEQ ID NO: 3252 - RNA, 19 nt, Artificial Sequence
  Description of Artificial Sequence: Synthetic oligonucleotide
uugucauuguccuuguccu

SEQ ID NO: 3253 - RNA, 19 nt, Artificial Sequence
  Description of Artificial Sequence: Synthetic oligonucleotide
guugucauuguccuugucc

SEQ ID NO: 3254 - RNA, 19 nt, Artificial Sequence
  Description of Artificial Sequence: Synthetic oligonucleotide
aguugucauuguccuuguc

SEQ ID NO: 3255 - RNA, 19 nt, Artificial Sequence
  Description of Artificial Sequence: Synthetic oligonucleotide
caguugucauuguccuugu

SEQ ID NO: 3256 - RNA, 19 nt, Artificial Sequence
  Description of Artificial Sequence: Synthetic oligonucleotide
gcaguugucauuguccuug

SEQ ID NO: 3257 - RNA, 19 nt, Artificial Sequence
  Description of Artificial Sequence: Synthetic oligonucleotide
agcaguugucauuguccuu

SEQ ID NO: 3258 - RNA, 19 nt, Artificial Sequence
  Description of Artificial Sequence: Synthetic oligonucleotide
aagcaguugucauuguccu

SEQ ID NO: 3259 - RNA, 19 nt, Artificial Sequence
  Description of Artificial Sequence: Synthetic oligonucleotide
caagcaguugucauugucc

SEQ ID NO: 3260 - RNA, 19 nt, Artificial Sequence
  Description of Artificial Sequence: Synthetic oligonucleotide
ccaagcaguugucauuguc

SEQ ID NO: 3261 - RNA, 19 nt, Artificial Sequence
  Description of Artificial Sequence: Synthetic oligonucleotide
uccaagcaguugucauugu

SEQ ID NO: 3262 - RNA, 19 nt, Artificial Sequence
  Description of Artificial Sequence: Synthetic oligonucleotide
guccaagcaguugucauug

SEQ ID NO: 3263 - RNA, 19 nt, Artificial Sequence
  Description of Artificial Sequence: Synthetic oligonucleotide
uguccaagcaguugucauu

SEQ ID NO: 3264 - RNA, 19 nt, Artificial Sequence
  Description of Artificial Sequence: Synthetic oligonucleotide
uuguccaagcaguugucau

SEQ ID NO: 3265 - RNA, 19 nt, Artificial Sequence
  Description of Artificial Sequence: Synthetic oligonucleotide
cuuguccaagcaguuguca

SEQ ID NO: 3266 - RNA, 19 nt, Artificial Sequence
  Description of Artificial Sequence: Synthetic oligonucleotide
acuuguccaagcaguuguc

SEQ ID NO: 3267 - RNA, 19 nt, Artificial Sequence
  Description of Artificial Sequence: Synthetic oligonucleotide
cacuuguccaagcaguugu

SEQ ID NO: 3268 - RNA, 19 nt, Artificial Sequence
  Description of Artificial Sequence: Synthetic oligonucleotide
acacuuguccaagcaguug

SEQ ID NO: 3269 - RNA, 19 nt, Artificial Sequence
  Description of Artificial Sequence: Synthetic oligonucleotide
cacacuuguccaagcaguu

SEQ ID NO: 3270 - RNA, 19 nt, Artificial Sequence
  Description of Artificial Sequence: Synthetic oligonucleotide
gcacacuuguccaagcagu

SEQ ID NO: 3271 - RNA, 19 nt, Artificial Sequence
  Description of Artificial Sequence: Synthetic oligonucleotide
ugcacacuuguccaagcag

SEQ ID NO: 3272 - RNA, 19 nt, Artificial Sequence
  Description of Artificial Sequence: Synthetic oligonucleotide
gugcacacuuguccaagca

SEQ ID NO: 3273 - RNA, 19 nt, Artificial Sequence
  Description of Artificial Sequence: Synthetic oligonucleotide
ugugcacacuuguccaagc

SEQ ID NO: 3274 - RNA, 19 nt, Artificial Sequence
  Description of Artificial Sequence: Synthetic oligonucleotide
cugugcacacuuguccaag

SEQ ID NO: 3275 - RNA, 19 nt, Artificial Sequence
  Description of Artificial Sequence: Synthetic oligonucleotide
gcugugcacacuuguccaa

SEQ ID NO: 3276 - RNA, 19 nt, Artificial Sequence
  Description of Artificial Sequence: Synthetic oligonucleotide
agcugugcacacuugucca

SEQ ID NO: 3277 - RNA, 19 nt, Artificial Sequence
  Description of Artificial Sequence: Synthetic oligonucleotide
gagcugugcacacuugucc

SEQ ID NO: 3278 - RNA, 19 nt, Artificial Sequence
  Description of Artificial Sequence: Synthetic oligonucleotide
ggagcugugcacacuuguc

SEQ ID NO: 3279 - RNA, 19 nt, Artificial Sequence
  Description of Artificial Sequence: Synthetic oligonucleotide
cggagcugugcacacuugu

SEQ ID NO: 3280 - RNA, 19 nt, Artificial Sequence
  Description of Artificial Sequence: Synthetic oligonucleotide
gcggagcugugcacacuug

SEQ ID NO: 3281 - RNA, 19 nt, Artificial Sequence
  Description of Artificial Sequence: Synthetic oligonucleotide
ugcggagcugugcacacuu

SEQ ID NO: 3282 - RNA, 19 nt, Artificial Sequence
  Description of Artificial Sequence: Synthetic oligonucleotide
uugcggagcugugcacacu

SEQ ID NO: 3283 - RNA, 19 nt, Artificial Sequence
  Description of Artificial Sequence: Synthetic oligonucleotide
uuugcggagcugugcacac

SEQ ID NO: 3284 - RNA, 19 nt, Artificial Sequence
  Description of Artificial Sequence: Synthetic oligonucleotide
cuuugcggagcugugcaca

SEQ ID NO: 3285 - RNA, 19 nt, Artificial Sequence
  Description of Artificial Sequence: Synthetic oligonucleotide
ccuuugcggagcugugcac

SEQ ID NO: 3286 - RNA, 19 nt, Artificial Sequence
  Description of Artificial Sequence: Synthetic oligonucleotide
accuuugcggagcugugca

SEQ ID NO: 3287 - RNA, 19 nt, Artificial Sequence
  Description of Artificial Sequence: Synthetic oligonucleotide
caccuuugcggagcugugc

SEQ ID NO: 3288 - RNA, 19 nt, Artificial Sequence
  Description of Artificial Sequence: Synthetic oligonucleotide
ccaccuuugcggagcugug

SEQ ID NO: 3289 - RNA, 19 nt, Artificial Sequence
  Description of Artificial Sequence: Synthetic oligonucleotide
gccaccuuugcggagcugu

SEQ ID NO: 3290 - RNA, 19 nt, Artificial Sequence
  Description of Artificial Sequence: Synthetic oligonucleotide
agccaccuuugcggagcug

SEQ ID NO: 3291 - RNA, 19 nt, Artificial Sequence
  Description of Artificial Sequence: Synthetic oligonucleotide
uagccaccuuugcggagcu

SEQ ID NO: 3292 - RNA, 19 nt, Artificial Sequence
  Description of Artificial Sequence: Synthetic oligonucleotide
guagccaccuuugcggagc

SEQ ID NO: 3293 - RNA, 19 nt, Artificial Sequence
  Description of Artificial Sequence: Synthetic oligonucleotide
aguagccaccuuugcggag

SEQ ID NO: 3294 - RNA, 19 nt, Artificial Sequence
  Description of Artificial Sequence: Synthetic oligonucleotide
caguagccaccuuugcgga

SEQ ID NO: 3295 - RNA, 19 nt, Artificial Sequence
  Description of Artificial Sequence: Synthetic oligonucleotide
ccaguagccaccuuugcgg

SEQ ID NO: 3296 - RNA, 19 nt, Artificial Sequence
  Description of Artificial Sequence: Synthetic oligonucleotide
accaguagccaccuuugcg

SEQ ID NO: 3297 - RNA, 19 nt, Artificial Sequence
  Description of Artificial Sequence: Synthetic oligonucleotide
uaccaguagccaccuuugc

SEQ ID NO: 3298 - RNA, 19 nt, Artificial Sequence
  Description of Artificial Sequence: Synthetic oligonucleotide
guaccaguagccaccuuug

SEQ ID NO: 3299 - RNA, 19 nt, Artificial Sequence
  Description of Artificial Sequence: Synthetic oligonucleotide
uguaccaguagccaccuuu

SEQ ID NO: 3300 - RNA, 19 nt, Artificial Sequence
  Description of Artificial Sequence: Synthetic oligonucleotide
uuguaccaguagccaccuu

SEQ ID NO: 3301 - RNA, 19 nt, Artificial Sequence
  Description of Artificial Sequence: Synthetic oligonucleotide
guuguaccaguagccaccu

SEQ ID NO: 3302 - RNA, 19 nt, Artificial Sequence
  Description of Artificial Sequence: Synthetic oligonucleotide
aguuguaccaguagccacc

SEQ ID NO: 3303 - RNA, 19 nt, Artificial Sequence
  Description of Artificial Sequence: Synthetic oligonucleotide
caguuguaccaguagccac

SEQ ID NO: 3304 - RNA, 19 nt, Artificial Sequence
  Description of Artificial Sequence: Synthetic oligonucleotide
gcaguuguaccaguagcca

SEQ ID NO: 3305 - RNA, 19 nt, Artificial Sequence
  Description of Artificial Sequence: Synthetic oligonucleotide
agcaguuguaccaguagcc

SEQ ID NO: 3306 - RNA, 19 nt, Artificial Sequence
  Description of Artificial Sequence: Synthetic oligonucleotide
cagcaguuguaccaguagc

SEQ ID NO: 3307 - RNA, 19 nt, Artificial Sequence
  Description of Artificial Sequence: Synthetic oligonucleotide
gcagcaguuguaccaguag

SEQ ID NO: 3308 - RNA, 19 nt, Artificial Sequence
  Description of Artificial Sequence: Synthetic oligonucleotide
ugcagcaguuguaccagua

SEQ ID NO: 3309 - RNA, 19 nt, Artificial Sequence
  Description of Artificial Sequence: Synthetic oligonucleotide
gugcagcaguuguaccagu

SEQ ID NO: 3310 - RNA, 19 nt, Artificial Sequence
  Description of Artificial Sequence: Synthetic oligonucleotide
ugugcagcaguuguaccag

SEQ ID NO: 3311 - RNA, 19 nt, Artificial Sequence
  Description of Artificial Sequence: Synthetic oligonucleotide
cugugcagcaguuguacca

SEQ ID NO: 3312 - RNA, 19 nt, Artificial Sequence
  Description of Artificial Sequence: Synthetic oligonucleotide
ucugugcagcaguuguacc

SEQ ID NO: 3313 - RNA, 19 nt, Artificial Sequence
  Description of Artificial Sequence: Synthetic oligonucleotide
gucugugcagcaguuguac

SEQ ID NO: 3314 - RNA, 19 nt, Artificial Sequence
  Description of Artificial Sequence: Synthetic oligonucleotide
agucugugcagcaguugua

SEQ ID NO: 3315 - RNA, 19 nt, Artificial Sequence
  Description of Artificial Sequence: Synthetic oligonucleotide
gagucugugcagcaguugu

SEQ ID NO: 3316 - RNA, 19 nt, Artificial Sequence
  Description of Artificial Sequence: Synthetic oligonucleotide
ggagucugugcagcaguug

SEQ ID NO: 3317 - RNA, 19 nt, Artificial Sequence
  Description of Artificial Sequence: Synthetic oligonucleotide
uggagucugugcagcaguu

SEQ ID NO: 3318 - RNA, 19 nt, Artificial Sequence
  Description of Artificial Sequence: Synthetic oligonucleotide
uuggagucugugcagcagu

SEQ ID NO: 3319 - RNA, 19 nt, Artificial Sequence
  Description of Artificial Sequence: Synthetic oligonucleotide
guuggagucugugcagcag

SEQ ID NO: 3320 - RNA, 19 nt, Artificial Sequence
  Description of Artificial Sequence: Synthetic oligonucleotide
gguuggagucugugcagca

SEQ ID NO: 3321 - RNA, 19 nt, Artificial Sequence
  Description of Artificial Sequence: Synthetic oligonucleotide
agguuggagucugugcagc

SEQ ID NO: 3322 - RNA, 19 nt, Artificial Sequence
  Description of Artificial Sequence: Synthetic oligonucleotide
gagguuggagucugugcag

SEQ ID NO: 3323 - RNA, 19 nt, Artificial Sequence
  Description of Artificial Sequence: Synthetic oligonucleotide
ugagguuggagucugugca

SEQ ID NO: 3324 - RNA, 19 nt, Artificial Sequence
  Description of Artificial Sequence: Synthetic oligonucleotide
uugagguuggagucugugc

SEQ ID NO: 3325 - RNA, 19 nt, Artificial Sequence
  Description of Artificial Sequence: Synthetic oligonucleotide
auugagguuggagucugug

SEQ ID NO: 3326 - RNA, 19 nt, Artificial Sequence
  Description of Artificial Sequence: Synthetic oligonucleotide
cauugagguuggagucugu

SEQ ID NO: 3327 - RNA, 19 nt, Artificial Sequence
  Description of Artificial Sequence: Synthetic oligonucleotide
ccauugagguuggagucug

SEQ ID NO: 3328 - RNA, 19 nt, Artificial Sequence
  Description of Artificial Sequence: Synthetic oligonucleotide
uccauugagguuggagucu

SEQ ID NO: 3329 - RNA, 19 nt, Artificial Sequence
  Description of Artificial Sequence: Synthetic oligonucleotide
cuccauugagguuggaguc

SEQ ID NO: 3330 - RNA, 19 nt, Artificial Sequence
  Description of Artificial Sequence: Synthetic oligonucleotide
acuccauugagguuggagu

SEQ ID NO: 3331 - RNA, 19 nt, Artificial Sequence
  Description of Artificial Sequence: Synthetic oligonucleotide
cacuccauugagguuggag

SEQ ID NO: 3332 - RNA, 19 nt, Artificial Sequence
  Description of Artificial Sequence: Synthetic oligonucleotide
acacuccauugagguugga

SEQ ID NO: 3333 - RNA, 19 nt, Artificial Sequence
  Description of Artificial Sequence: Synthetic oligonucleotide
uacacuccauugagguugg

SEQ ID NO: 3334 - RNA, 19 nt, Artificial Sequence
  Description of Artificial Sequence: Synthetic oligonucleotide
guacacuccauugagguug

SEQ ID NO: 3335 - RNA, 19 nt, Artificial Sequence
  Description of Artificial Sequence: Synthetic oligonucleotide
aguacacuccauugagguu

SEQ ID NO: 3336 - RNA, 19 nt, Artificial Sequence
  Description of Artificial Sequence: Synthetic oligonucleotide
uaguacacuccauugaggu

SEQ ID NO: 3337 - RNA, 19 nt, Artificial Sequence
  Description of Artificial Sequence: Synthetic oligonucleotide
guaguacacuccauugagg

SEQ ID NO: 3338 - RNA, 19 nt, Artificial Sequence
  Description of Artificial Sequence: Synthetic oligonucleotide
gguaguacacuccauugag

SEQ ID NO: 3339 - RNA, 19 nt, Artificial Sequence
  Description of Artificial Sequence: Synthetic oligonucleotide
cgguaguacacuccauuga

SEQ ID NO: 3340 - RNA, 19 nt, Artificial Sequence
  Description of Artificial Sequence: Synthetic oligonucleotide
gcgguaguacacuccauug

SEQ ID NO: 3341 - RNA, 19 nt, Artificial Sequence
  Description of Artificial Sequence: Synthetic oligonucleotide
ggcgguaguacacuccauu

SEQ ID NO: 3342 - RNA, 19 nt, Artificial Sequence
  Description of Artificial Sequence: Synthetic oligonucleotide
aggcgguaguacacuccau

SEQ ID NO: 3343 - RNA, 19 nt, Artificial Sequence
  Description of Artificial Sequence: Synthetic oligonucleotide
caggcgguaguacacucca

SEQ ID NO: 3344 - RNA, 19 nt, Artificial Sequence
  Description of Artificial Sequence: Synthetic oligonucleotide
ccaggcgguaguacacucc

SEQ ID NO: 3345 - RNA, 19 nt, Artificial Sequence
  Description of Artificial Sequence: Synthetic oligonucleotide
cccaggcgguaguacacuc

SEQ ID NO: 3346 - RNA, 19 nt, Artificial Sequence
  Description of Artificial Sequence: Synthetic oligonucleotide
acccaggcgguaguacacu

SEQ ID NO: 3347 - RNA, 19 nt, Artificial Sequence
  Description of Artificial Sequence: Synthetic oligonucleotide
cacccaggcgguaguacac

SEQ ID NO: 3348 - RNA, 19 nt, Artificial Sequence
  Description of Artificial Sequence: Synthetic oligonucleotide
ucacccaggcgguaguaca

SEQ ID NO: 3349 - RNA, 19 nt, Artificial Sequence
  Description of Artificial Sequence: Synthetic oligonucleotide
cucacccaggcgguaguac

SEQ ID NO: 3350 - RNA, 19 nt, Artificial Sequence
  Description of Artificial Sequence: Synthetic oligonucleotide
gcucacccaggcgguagua

SEQ ID NO: 3351 - RNA, 19 nt, Artificial Sequence
  Description of Artificial Sequence: Synthetic oligonucleotide
ugcucacccaggcgguagu

SEQ ID NO: 3352 - RNA, 19 nt, Artificial Sequence
  Description of Artificial Sequence: Synthetic oligonucleotide
gugcucacccaggcgguag

SEQ ID NO: 3353 - RNA, 19 nt, Artificial Sequence
  Description of Artificial Sequence: Synthetic oligonucleotide
ugugcucacccaggcggua

SEQ ID NO: 3354 - RNA, 19 nt, Artificial Sequence
  Description of Artificial Sequence: Synthetic oligonucleotide
uugugcucacccaggcggu

SEQ ID NO: 3355 - RNA, 19 nt, Artificial Sequence
  Description of Artificial Sequence: Synthetic oligonucleotide
auugugcucacccaggcgg

SEQ ID NO: 3356 - RNA, 19 nt, Artificial Sequence
  Description of Artificial Sequence: Synthetic oligonucleotide
uauugugcucacccaggcg

SEQ ID NO: 3357 - RNA, 19 nt, Artificial Sequence
  Description of Artificial Sequence: Synthetic oligonucleotide
uuauugugcucacccaggc

SEQ ID NO: 3358 - RNA, 19 nt, Artificial Sequence
  Description of Artificial Sequence: Synthetic oligonucleotide
cuuauugugcucacccagg

SEQ ID NO: 3359 - RNA, 19 nt, Artificial Sequence
  Description of Artificial Sequence: Synthetic oligonucleotide
gcuuauugugcucacccag

SEQ ID NO: 3360 - RNA, 19 nt, Artificial Sequence
  Description of Artificial Sequence: Synthetic oligonucleotide
ugcuuauugugcucaccca

SEQ ID NO: 3361 - RNA, 19 nt, Artificial Sequence
  Description of Artificial Sequence: Synthetic oligonucleotide
gugcuuauugugcucaccc

SEQ ID NO: 3362 - RNA, 19 nt, Artificial Sequence
  Description of Artificial Sequence: Synthetic oligonucleotide
ggugcuuauugugcucacc

SEQ ID NO: 3363 - RNA, 19 nt, Artificial Sequence
  Description of Artificial Sequence: Synthetic oligonucleotide
aggugcuuauugugcucac

SEQ ID NO: 3364 - RNA, 19 nt, Artificial Sequence
  Description of Artificial Sequence: Synthetic oligonucleotide
caggugcuuauugugcuca

SEQ ID NO: 3365 - RNA, 19 nt, Artificial Sequence
  Description of Artificial Sequence: Synthetic oligonucleotide
ccaggugcuuauugugcuc

SEQ ID NO: 3366 - RNA, 19 nt, Artificial Sequence
  Description of Artificial Sequence: Synthetic oligonucleotide
uccaggugcuuauugugcu

SEQ ID NO: 3367 - RNA, 19 nt, Artificial Sequence
  Description of Artificial Sequence: Synthetic oligonucleotide
auccaggugcuuauugugc

SEQ ID NO: 3368 - RNA, 19 nt, Artificial Sequence
  Description of Artificial Sequence: Synthetic oligonucleotide
cauccaggugcuuauugug

SEQ ID NO: 3369 - RNA, 19 nt, Artificial Sequence
  Description of Artificial Sequence: Synthetic oligonucleotide
ccauccaggugcuuauugu

SEQ ID NO: 3370 - RNA, 19 nt, Artificial Sequence
  Description of Artificial Sequence: Synthetic oligonucleotide
gccauccaggugcuuauug

SEQ ID NO: 3371 - RNA, 19 nt, Artificial Sequence
  Description of Artificial Sequence: Synthetic oligonucleotide
ugccauccaggugcuuauu

SEQ ID NO: 3372 - RNA, 19 nt, Artificial Sequence
  Description of Artificial Sequence: Synthetic oligonucleotide
augccauccaggugcuuau

SEQ ID NO: 3373 - RNA, 19 nt, Artificial Sequence
  Description of Artificial Sequence: Synthetic oligonucleotide
gaugccauccaggugcuua

SEQ ID NO: 3374 - RNA, 19 nt, Artificial Sequence
  Description of Artificial Sequence: Synthetic oligonucleotide
ugaugccauccaggugcuu

SEQ ID NO: 3375 - RNA, 19 nt, Artificial Sequence
  Description of Artificial Sequence: Synthetic oligonucleotide
gugaugccauccaggugcu

SEQ ID NO: 3376 - RNA, 19 nt, Artificial Sequence
  Description of Artificial Sequence: Synthetic oligonucleotide
ggugaugccauccaggugc

SEQ ID NO: 3377 - RNA, 19 nt, Artificial Sequence
  Description of Artificial Sequence: Synthetic oligonucleotide
aggugaugccauccaggug

SEQ ID NO: 3378 - RNA, 19 nt, Artificial Sequence
  Description of Artificial Sequence: Synthetic oligonucleotide
caggugaugccauccaggu

SEQ ID NO: 3379 - RNA, 19 nt, Artificial Sequence
  Description of Artificial Sequence: Synthetic oligonucleotide
ccaggugaugccauccagg

SEQ ID NO: 3380 - RNA, 19 nt, Artificial Sequence
  Description of Artificial Sequence: Synthetic oligonucleotide
accaggugaugccauccag

SEQ ID NO: 3381 - RNA, 19 nt, Artificial Sequence
  Description of Artificial Sequence: Synthetic oligonucleotide
uaccaggugaugccaucca

SEQ ID NO: 3382 - RNA, 19 nt, Artificial Sequence
  Description of Artificial Sequence: Synthetic oligonucleotide
auaccaggugaugccaucc

SEQ ID NO: 3383 - RNA, 19 nt, Artificial Sequence
  Description of Artificial Sequence: Synthetic oligonucleotide
cauaccaggugaugccauc

SEQ ID NO: 3384 - RNA, 19 nt, Artificial Sequence
  Description of Artificial Sequence: Synthetic oligonucleotide
ccauaccaggugaugccau

SEQ ID NO: 3385 - RNA, 19 nt, Artificial Sequence
  Description of Artificial Sequence: Synthetic oligonucleotide
gccauaccaggugaugcca

SEQ ID NO: 3386 - RNA, 19 nt, Artificial Sequence
  Description of Artificial Sequence: Synthetic oligonucleotide
agccauaccaggugaugcc

SEQ ID NO: 3387 - RNA, 19 nt, Artificial Sequence
  Description of Artificial Sequence: Synthetic oligonucleotide
cagccauaccaggugaugc

SEQ ID NO: 3388 - RNA, 19 nt, Artificial Sequence
  Description of Artificial Sequence: Synthetic oligonucleotide
ccagccauaccaggugaug

SEQ ID NO: 3389 - RNA, 19 nt, Artificial Sequence
  Description of Artificial Sequence: Synthetic oligonucleotide
gccagccauaccaggugau

SEQ ID NO: 3390 - RNA, 19 nt, Artificial Sequence
  Description of Artificial Sequence: Synthetic oligonucleotide
ugccagccauaccagguga

SEQ ID NO: 3391 - RNA, 19 nt, Artificial Sequence
  Description of Artificial Sequence: Synthetic oligonucleotide
augccagccauaccaggug

SEQ ID NO: 3392 - RNA, 19 nt, Artificial Sequence
  Description of Artificial Sequence: Synthetic oligonucleotide
caugccagccauaccaggu

SEQ ID NO: 3393 - RNA, 19 nt, Artificial Sequence
  Description of Artificial Sequence: Synthetic oligonucleotide
ccaugccagccauaccagg

SEQ ID NO: 3394 - RNA, 19 nt, Artificial Sequence
  Description of Artificial Sequence: Synthetic oligonucleotide
uccaugccagccauaccag

SEQ ID NO: 3395 - RNA, 19 nt, Artificial Sequence
  Description of Artificial Sequence: Synthetic oligonucleotide
auccaugccagccauacca

SEQ ID NO: 3396 - RNA, 19 nt, Artificial Sequence
  Description of Artificial Sequence: Synthetic oligonucleotide
gauccaugccagccauacc

SEQ ID NO: 3397 - RNA, 19 nt, Artificial Sequence
  Description of Artificial Sequence: Synthetic oligonucleotide
agauccaugccagccauac

SEQ ID NO: 3398 - RNA, 19 nt, Artificial Sequence
  Description of Artificial Sequence: Synthetic oligonucleotide
uagauccaugccagccaua

SEQ ID NO: 3399 - RNA, 19 nt, Artificial Sequence
  Description of Artificial Sequence: Synthetic oligonucleotide
guagauccaugccagccau

SEQ ID NO: 3400 - RNA, 19 nt, Artificial Sequence
  Description of Artificial Sequence: Synthetic oligonucleotide
gguagauccaugccagcca

SEQ ID NO: 3401 - RNA, 19 nt, Artificial Sequence
  Description of Artificial Sequence: Synthetic oligonucleotide
agguagauccaugccagcc

SEQ ID NO: 3402 - RNA, 19 nt, Artificial Sequence
  Description of Artificial Sequence: Synthetic oligonucleotide
uagguagauccaugccagc

SEQ ID NO: 3403 - RNA, 19 nt, Artificial Sequence
  Description of Artificial Sequence: Synthetic oligonucleotide
guagguagauccaugccag

SEQ ID NO: 3404 - RNA, 19 nt, Artificial Sequence
  Description of Artificial Sequence: Synthetic oligonucleotide
aguagguagauccaugcca

SEQ ID NO: 3405 - RNA, 19 nt, Artificial Sequence
  Description of Artificial Sequence: Synthetic oligonucleotide
gaguagguagauccaugcc

SEQ ID NO: 3406 - RNA, 19 nt, Artificial Sequence
  Description of Artificial Sequence: Synthetic oligonucleotide
ggaguagguagauccaugc

SEQ ID NO: 3407 - RNA, 19 nt, Artificial Sequence
  Description of Artificial Sequence: Synthetic oligonucleotide
gggaguagguagauccaug

SEQ ID NO: 3408 - RNA, 19 nt, Artificial Sequence
  Description of Artificial Sequence: Synthetic oligonucleotide
agggaguagguagauccau

SEQ ID NO: 3409 - RNA, 19 nt, Artificial Sequence
  Description of Artificial Sequence: Synthetic oligonucleotide
gagggaguagguagaucca

SEQ ID NO: 3410 - RNA, 19 nt, Artificial Sequence
  Description of Artificial Sequence: Synthetic oligonucleotide
ugagggaguagguagaucc

SEQ ID NO: 3411 - RNA, 19 nt, Artificial Sequence
  Description of Artificial Sequence: Synthetic oligonucleotide
uugagggaguagguagauc

SEQ ID NO: 3412 - RNA, 19 nt, Artificial Sequence
  Description of Artificial Sequence: Synthetic oligonucleotide
uuugagggaguagguagau

SEQ ID NO: 3413 - RNA, 19 nt, Artificial Sequence
  Description of Artificial Sequence: Synthetic oligonucleotide
guuugagggaguagguaga

SEQ ID NO: 3414 - RNA, 19 nt, Artificial Sequence
  Description of Artificial Sequence: Synthetic oligonucleotide
cguuugagggaguagguag

SEQ ID NO: 3415 - RNA, 19 nt, Artificial Sequence
  Description of Artificial Sequence: Synthetic oligonucleotide
ccguuugagggaguaggua

SEQ ID NO: 3416 - RNA, 19 nt, Artificial Sequence
  Description of Artificial Sequence: Synthetic oligonucleotide
cccguuugagggaguaggu

SEQ ID NO: 3417 - RNA, 19 nt, Artificial Sequence
  Description of Artificial Sequence: Synthetic oligonucleotide
acccguuugagggaguagg

SEQ ID NO: 3418 - RNA, 19 nt, Artificial Sequence
  Description of Artificial Sequence: Synthetic oligonucleotide
cacccguuugagggaguag

SEQ ID NO: 3419 - RNA, 19 nt, Artificial Sequence
  Description of Artificial Sequence: Synthetic oligonucleotide
ccacccguuugagggagua

SEQ ID NO: 3420 - RNA, 19 nt, Artificial Sequence
  Description of Artificial Sequence: Synthetic oligonucleotide
uccacccguuugagggagu

SEQ ID NO: 3421 - RNA, 19 nt, Artificial Sequence
  Description of Artificial Sequence: Synthetic oligonucleotide
cuccacccguuugagggag

SEQ ID NO: 3422 - RNA, 19 nt, Artificial Sequence
  Description of Artificial Sequence: Synthetic oligonucleotide
ucuccacccguuugaggga

SEQ ID NO: 3423 - RNA, 19 nt, Artificial Sequence
  Description of Artificial Sequence: Synthetic oligonucleotide
aucuccacccguuugaggg

SEQ ID NO: 3424 - RNA, 19 nt, Artificial Sequence
  Description of Artificial Sequence: Synthetic oligonucleotide
caucuccacccguuugagg

SEQ ID NO: 3425 - RNA, 19 nt, Artificial Sequence
  Description of Artificial Sequence: Synthetic oligonucleotide
ucaucuccacccguuugag

SEQ ID NO: 3426 - RNA, 19 nt, Artificial Sequence
  Description of Artificial Sequence: Synthetic oligonucleotide
uucaucuccacccguuuga

SEQ ID NO: 3427 - RNA, 19 nt, Artificial Sequence
  Description of Artificial Sequence: Synthetic oligonucleotide
uuucaucuccacccguuug

SEQ ID NO: 3428 - RNA, 19 nt, Artificial Sequence
  Description of Artificial Sequence: Synthetic oligonucleotide
uuuucaucuccacccguuu

SEQ ID NO: 3429 - RNA, 19 nt, Artificial Sequence
  Description of Artificial Sequence: Synthetic oligonucleotide
auuuucaucuccacccguu

SEQ ID NO: 3430 - RNA, 19 nt, Artificial Sequence
  Description of Artificial Sequence: Synthetic oligonucleotide
gauuuucaucuccacccgu

SEQ ID NO: 3431 - RNA, 19 nt, Artificial Sequence
  Description of Artificial Sequence: Synthetic oligonucleotide
ggauuuucaucuccacccg

SEQ ID NO: 3432 - RNA, 19 nt, Artificial Sequence
  Description of Artificial Sequence: Synthetic oligonucleotide
cggauuuucaucuccaccc

SEQ ID NO: 3433 - RNA, 19 nt, Artificial Sequence
  Description of Artificial Sequence: Synthetic oligonucleotide
gcggauuuucaucuccacc

SEQ ID NO: 3434 - RNA, 19 nt, Artificial Sequence
  Description of Artificial Sequence: Synthetic oligonucleotide
ggcggauuuucaucuccac

SEQ ID NO: 3435 - RNA, 19 nt, Artificial Sequence
  Description of Artificial Sequence: Synthetic oligonucleotide
gggcggauuuucaucucca

SEQ ID NO: 3436 - RNA, 19 nt, Artificial Sequence
  Description of Artificial Sequence: Synthetic oligonucleotide
ugggcggauuuucaucucc

SEQ ID NO: 3437 - RNA, 19 nt, Artificial Sequence
  Description of Artificial Sequence: Synthetic oligonucleotide
cugggcggauuuucaucuc

SEQ ID NO: 3438 - RNA, 19 nt, Artificial Sequence
  Description of Artificial Sequence: Synthetic oligonucleotide
ucugggcggauuuucaucu

SEQ ID NO: 3439 - RNA, 19 nt, Artificial Sequence
  Description of Artificial Sequence: Synthetic oligonucleotide
uucugggcggauuuucauc

SEQ ID NO: 3440 - RNA, 19 nt, Artificial Sequence
  Description of Artificial Sequence: Synthetic oligonucleotide
cuucugggcggauuuucau

SEQ ID NO: 3441 - RNA, 19 nt, Artificial Sequence
  Description of Artificial Sequence: Synthetic oligonucleotide
ucuucugggcggauuuuca

SEQ ID NO: 3442 - RNA, 19 nt, Artificial Sequence
  Description of Artificial Sequence: Synthetic oligonucleotide
gucuucugggcggauuuuc

SEQ ID NO: 3443 - RNA, 19 nt, Artificial Sequence
  Description of Artificial Sequence: Synthetic oligonucleotide
agucuucugggcggauuuu

SEQ ID NO: 3444 - RNA, 19 nt, Artificial Sequence
  Description of Artificial Sequence: Synthetic oligonucleotide
aagucuucugggcggauuu

SEQ ID NO: 3445 - RNA, 19 nt, Artificial Sequence
  Description of Artificial Sequence: Synthetic oligonucleotide
gaagucuucugggcggauu

SEQ ID NO: 3446 - RNA, 19 nt, Artificial Sequence
  Description of Artificial Sequence: Synthetic oligonucleotide
ugaagucuucugggcggau

SEQ ID NO: 3447 - RNA, 19 nt, Artificial Sequence
  Description of Artificial Sequence: Synthetic oligonucleotide
uugaagucuucugggcgga

SEQ ID NO: 3448 - RNA, 19 nt, Artificial Sequence
  Description of Artificial Sequence: Synthetic oligonucleotide
cuugaagucuucugggcgg

SEQ ID NO: 3449 - RNA, 19 nt, Artificial Sequence
  Description of Artificial Sequence: Synthetic oligonucleotide
gcuugaagucuucugggcg

SEQ ID NO: 3450 - RNA, 19 nt, Artificial Sequence
  Description of Artificial Sequence: Synthetic oligonucleotide
ggcuugaagucuucugggc

SEQ ID NO: 3451 - RNA, 19 nt, Artificial Sequence
  Description of Artificial Sequence: Synthetic oligonucleotide
aggcuugaagucuucuggg

SEQ ID NO: 3452 - RNA, 19 nt, Artificial Sequence
  Description of Artificial Sequence: Synthetic oligonucleotide
aaggcuugaagucuucugg

SEQ ID NO: 3453 - RNA, 19 nt, Artificial Sequence
  Description of Artificial Sequence: Synthetic oligonucleotide
uaaggcuugaagucuucug

SEQ ID NO: 3454 - RNA, 19 nt, Artificial Sequence
  Description of Artificial Sequence: Synthetic oligonucleotide
uuaaggcuugaagucuucu

SEQ ID NO: 3455 - RNA, 19 nt, Artificial Sequence
  Description of Artificial Sequence: Synthetic oligonucleotide
uuuaaggcuugaagucuuc

SEQ ID NO: 3456 - RNA, 19 nt, Artificial Sequence
  Description of Artificial Sequence: Synthetic oligonucleotide
uuuuaaggcuugaagucuu

SEQ ID NO: 3457 - RNA, 19 nt, Artificial Sequence
  Description of Artificial Sequence: Synthetic oligonucleotide
cuuuuaaggcuugaagucu

SEQ ID NO: 3458 - RNA, 19 nt, Artificial Sequence
  Description of Artificial Sequence: Synthetic oligonucleotide
ccuuuuaaggcuugaaguc

SEQ ID NO: 3459 - RNA, 19 nt, Artificial Sequence
  Description of Artificial Sequence: Synthetic oligonucleotide
uccuuuuaaggcuugaagu

SEQ ID NO: 3460 - RNA, 19 nt, Artificial Sequence
  Description of Artificial Sequence: Synthetic oligonucleotide
cuccuuuuaaggcuugaag

SEQ ID NO: 3461 - RNA, 19 nt, Artificial Sequence
  Description of Artificial Sequence: Synthetic oligonucleotide
ccuccuuuuaaggcuugaa

SEQ ID NO: 3462 - RNA, 19 nt, Artificial Sequence
  Description of Artificial Sequence: Synthetic oligonucleotide
gccuccuuuuaaggcuuga

SEQ ID NO: 3463 - RNA, 19 nt, Artificial Sequence
  Description of Artificial Sequence: Synthetic oligonucleotide
agccuccuuuuaaggcuug

SEQ ID NO: 3464 - RNA, 19 nt, Artificial Sequence
  Description of Artificial Sequence: Synthetic oligonucleotide
cagccuccuuuuaaggcuu

SEQ ID NO: 3465 - RNA, 19 nt, Artificial Sequence
  Description of Artificial Sequence: Synthetic oligonucleotide
gcagccuccuuuuaaggcu

SEQ ID NO: 3466 - RNA, 19 nt, Artificial Sequence
  Description of Artificial Sequence: Synthetic oligonucleotide
ggcagccuccuuuuaaggc

SEQ ID NO: 3467 - RNA, 19 nt, Artificial Sequence
  Description of Artificial Sequence: Synthetic oligonucleotide
cggcagccuccuuuuaagg

SEQ ID NO: 3468 - RNA, 19 nt, Artificial Sequence
  Description of Artificial Sequence: Synthetic oligonucleotide
acggcagccuccuuuuaag

SEQ ID NO: 3469 - RNA, 19 nt, Artificial Sequence
  Description of Artificial Sequence: Synthetic oligonucleotide
cacggcagccuccuuuuaa

SEQ ID NO: 3470 - RNA, 19 nt, Artificial Sequence
  Description of Artificial Sequence: Synthetic oligonucleotide
ccacggcagccuccuuuua

SEQ ID NO: 3471 - RNA, 19 nt, Artificial Sequence
  Description of Artificial Sequence: Synthetic oligonucleotide
uccacggcagccuccuuuu

SEQ ID NO: 3472 - RNA, 19 nt, Artificial Sequence
  Description of Artificial Sequence: Synthetic oligonucleotide
cuccacggcagccuccuuu

SEQ ID NO: 3473 - RNA, 19 nt, Artificial Sequence
  Description of Artificial Sequence: Synthetic oligonucleotide
gcuccacggcagccuccuu

SEQ ID NO: 3474 - RNA, 19 nt, Artificial Sequence
  Description of Artificial Sequence: Synthetic oligonucleotide
ugcuccacggcagccuccu

SEQ ID NO: 3475 - RNA, 19 nt, Artificial Sequence
  Description of Artificial Sequence: Synthetic oligonucleotide
gugcuccacggcagccucc

SEQ ID NO: 3476 - RNA, 19 nt, Artificial Sequence
  Description of Artificial Sequence: Synthetic oligonucleotide
cgugcuccacggcagccuc

SEQ ID NO: 3477 - RNA, 19 nt, Artificial Sequence
  Description of Artificial Sequence: Synthetic oligonucleotide
ccgugcuccacggcagccu

SEQ ID NO: 3478 - RNA, 19 nt, Artificial Sequence
  Description of Artificial Sequence: Synthetic oligonucleotide
uccgugcuccacggcagcc

SEQ ID NO: 3479 - RNA, 19 nt, Artificial Sequence
  Description of Artificial Sequence: Synthetic oligonucleotide
auccgugcuccacggcagc

SEQ ID NO: 3480 - RNA, 19 nt, Artificial Sequence
  Description of Artificial Sequence: Synthetic oligonucleotide
uauccgugcuccacggcag

SEQ ID NO: 3481 - RNA, 19 nt, Artificial Sequence
  Description of Artificial Sequence: Synthetic oligonucleotide
guauccgugcuccacggca

SEQ ID NO: 3482 - RNA, 19 nt, Artificial Sequence
  Description of Artificial Sequence: Synthetic oligonucleotide
uguauccgugcuccacggc

SEQ ID NO: 3483 - RNA, 19 nt, Artificial Sequence
  Description of Artificial Sequence: Synthetic oligonucleotide
cuguauccgugcuccacgg

SEQ ID NO: 3484 - RNA, 19 nt, Artificial Sequence
  Description of Artificial Sequence: Synthetic oligonucleotide
ucuguauccgugcuccacg

SEQ ID NO: 3485 - RNA, 19 nt, Artificial Sequence
  Description of Artificial Sequence: Synthetic oligonucleotide
uucuguauccgugcuccac

SEQ ID NO: 3486 - RNA, 19 nt, Artificial Sequence
  Description of Artificial Sequence: Synthetic oligonucleotide
uuucuguauccgugcucca

SEQ ID NO: 3487 - RNA, 19 nt, Artificial Sequence
  Description of Artificial Sequence: Synthetic oligonucleotide
guuucuguauccgugcucc

SEQ ID NO: 3488 - RNA, 19 nt, Artificial Sequence
  Description of Artificial Sequence: Synthetic oligonucleotide
aguuucuguauccgugcuc

SEQ ID NO: 3489 - RNA, 19 nt, Artificial Sequence
  Description of Artificial Sequence: Synthetic oligonucleotide
caguuucuguauccgugcu

SEQ ID NO: 3490 - RNA, 19 nt, Artificial Sequence
  Description of Artificial Sequence: Synthetic oligonucleotide
ucaguuucuguauccgugc

SEQ ID NO: 3491 - RNA, 19 nt, Artificial Sequence
  Description of Artificial Sequence: Synthetic oligonucleotide
cucaguuucuguauccgug

SEQ ID NO: 3492 - RNA, 19 nt, Artificial Sequence
  Description of Artificial Sequence: Synthetic oligonucleotide
ucucaguuucuguauccgu

SEQ ID NO: 3493 - RNA, 19 nt, Artificial Sequence
  Description of Artificial Sequence: Synthetic oligonucleotide
gucucaguuucuguauccg

SEQ ID NO: 3494 - RNA, 19 nt, Artificial Sequence
  Description of Artificial Sequence: Synthetic oligonucleotide
ugucucaguuucuguaucc

SEQ ID NO: 3495 - RNA, 19 nt, Artificial Sequence
  Description of Artificial Sequence: Synthetic oligonucleotide
gugucucaguuucuguauc

SEQ ID NO: 3496 - RNA, 19 nt, Artificial Sequence
  Description of Artificial Sequence: Synthetic oligonucleotide
cgugucucaguuucuguau

SEQ ID NO: 3497 - RNA, 19 nt, Artificial Sequence
  Description of Artificial Sequence: Synthetic oligonucleotide
acgugucucaguuucugua

SEQ ID NO: 3498 - RNA, 19 nt, Artificial Sequence
  Description of Artificial Sequence: Synthetic oligonucleotide
cacgugucucaguuucugu

SEQ ID NO: 3499 - RNA, 19 nt, Artificial Sequence
  Description of Artificial Sequence: Synthetic oligonucleotide
ccacgugucucaguuucug

SEQ ID NO: 3500 - RNA, 19 nt, Artificial Sequence
  Description of Artificial Sequence: Synthetic oligonucleotide
uccacgugucucaguuucu

SEQ ID NO: 3501 - RNA, 19 nt, Artificial Sequence
  Description of Artificial Sequence: Synthetic oligonucleotide
cuccacgugucucaguuuc

SEQ ID NO: 3502 - RNA, 19 nt, Artificial Sequence
  Description of Artificial Sequence: Synthetic oligonucleotide
ucuccacgugucucaguuu

SEQ ID NO: 3503 - RNA, 19 nt, Artificial Sequence
  Description of Artificial Sequence: Synthetic oligonucleotide
gucuccacgugucucaguu

SEQ ID NO: 3504 - RNA, 19 nt, Artificial Sequence
  Description of Artificial Sequence: Synthetic oligonucleotide
agucuccacgugucucagu

SEQ ID NO: 3505 - RNA, 19 nt, Artificial Sequence
  Description of Artificial Sequence: Synthetic oligonucleotide
cagucuccacgugucucag

SEQ ID NO: 3506 - RNA, 19 nt, Artificial Sequence
  Description of Artificial Sequence: Synthetic oligonucleotide
ccagucuccacgugucuca

SEQ ID NO: 3507 - RNA, 19 nt, Artificial Sequence
  Description of Artificial Sequence: Synthetic oligonucleotide
uccagucuccacgugucuc

SEQ ID NO: 3508 - RNA, 19 nt, Artificial Sequence
  Description of Artificial Sequence: Synthetic oligonucleotide
auccagucuccacgugucu

SEQ ID NO: 3509 - RNA, 19 nt, Artificial Sequence
  Description of Artificial Sequence: Synthetic oligonucleotide
cauccagucuccacguguc

SEQ ID NO: 3510 - RNA, 19 nt, Artificial Sequence
  Description of Artificial Sequence: Synthetic oligonucleotide
ucauccagucuccacgugu

SEQ ID NO: 3511 - RNA, 19 nt, Artificial Sequence
  Description of Artificial Sequence: Synthetic oligonucleotide
cucauccagucuccacgug

SEQ ID NO: 3512 - RNA, 19 nt, Artificial Sequence
  Description of Artificial Sequence: Synthetic oligonucleotide
ccucauccagucuccacgu

SEQ ID NO: 3513 - RNA, 19 nt, Artificial Sequence
  Description of Artificial Sequence: Synthetic oligonucleotide
cccucauccagucuccacg

SEQ ID NO: 3514 - RNA, 19 nt, Artificial Sequence
  Description of Artificial Sequence: Synthetic oligonucleotide
gcccucauccagucuccac

SEQ ID NO: 3515 - RNA, 19 nt, Artificial Sequence
  Description of Artificial Sequence: Synthetic oligonucleotide
ugcccucauccagucucca

SEQ ID NO: 3516 - RNA, 19 nt, Artificial Sequence
  Description of Artificial Sequence: Synthetic oligonucleotide
cugcccucauccagucucc

SEQ ID NO: 3517 - RNA, 19 nt, Artificial Sequence
  Description of Artificial Sequence: Synthetic oligonucleotide
ucugcccucauccagucuc

SEQ ID NO: 3518 - RNA, 19 nt, Artificial Sequence
  Description of Artificial Sequence: Synthetic oligonucleotide
aucugcccucauccagucu

SEQ ID NO: 3519 - RNA, 19 nt, Artificial Sequence
  Description of Artificial Sequence: Synthetic oligonucleotide
caucugcccucauccaguc

SEQ ID NO: 3520 - RNA, 19 nt, Artificial Sequence
  Description of Artificial Sequence: Synthetic oligonucleotide
ucaucugcccucauccagu

SEQ ID NO: 3521 - RNA, 19 nt, Artificial Sequence
  Description of Artificial Sequence: Synthetic oligonucleotide
cucaucugcccucauccag

SEQ ID NO: 3522 - RNA, 19 nt, Artificial Sequence
  Description of Artificial Sequence: Synthetic oligonucleotide
ccucaucugcccucaucca

SEQ ID NO: 3523 - RNA, 19 nt, Artificial Sequence
  Description of Artificial Sequence: Synthetic oligonucleotide
uccucaucugcccucaucc

SEQ ID NO: 3524 - RNA, 19 nt, Artificial Sequence
  Description of Artificial Sequence: Synthetic oligonucleotide
guccucaucugcccucauc

SEQ ID NO: 3525 - RNA, 19 nt, Artificial Sequence
  Description of Artificial Sequence: Synthetic oligonucleotide
uguccucaucugcccucau

SEQ ID NO: 3526 - RNA, 19 nt, Artificial Sequence
  Description of Artificial Sequence: Synthetic oligonucleotide
cuguccucaucugcccuca

SEQ ID NO: 3527 - RNA, 19 nt, Artificial Sequence
  Description of Artificial Sequence: Synthetic oligonucleotide
ccuguccucaucugcccuc

SEQ ID NO: 3528 - RNA, 19 nt, Artificial Sequence
  Description of Artificial Sequence: Synthetic oligonucleotide
uccuguccucaucugcccu

SEQ ID NO: 3529 - RNA, 19 nt, Artificial Sequence
  Description of Artificial Sequence: Synthetic oligonucleotide
uuccuguccucaucugccc

SEQ ID NO: 3530 - RNA, 19 nt, Artificial Sequence
  Description of Artificial Sequence: Synthetic oligonucleotide
cuuccuguccucaucugcc

SEQ ID NO: 3531 - RNA, 19 nt, Artificial Sequence
  Description of Artificial Sequence: Synthetic oligonucleotide
ucuuccuguccucaucugc

SEQ ID NO: 3532 - RNA, 19 nt, Artificial Sequence
  Description of Artificial Sequence: Synthetic oligonucleotide
cucuuccuguccucaucug

SEQ ID NO: 3533 - RNA, 19 nt, Artificial Sequence
  Description of Artificial Sequence: Synthetic oligonucleotide
ucucuuccuguccucaucu

SEQ ID NO: 3534 - RNA, 19 nt, Artificial Sequence
  Description of Artificial Sequence: Synthetic oligonucleotide
cucucuuccuguccucauc

SEQ ID NO: 3535 - RNA, 19 nt, Artificial Sequence
  Description of Artificial Sequence: Synthetic oligonucleotide
acucucuuccuguccucau

SEQ ID NO: 3536 - RNA, 19 nt, Artificial Sequence
  Description of Artificial Sequence: Synthetic oligonucleotide
cacucucuuccuguccuca

SEQ ID NO: 3537 - RNA, 19 nt, Artificial Sequence
  Description of Artificial Sequence: Synthetic oligonucleotide
acacucucuuccuguccuc

SEQ ID NO: 3538 - RNA, 19 nt, Artificial Sequence
  Description of Artificial Sequence: Synthetic oligonucleotide
aacacucucuuccuguccu

SEQ ID NO: 3539 - RNA, 19 nt, Artificial Sequence
  Description of Artificial Sequence: Synthetic oligonucleotide
uaacacucucuuccugucc

SEQ ID NO: 3540 - RNA, 19 nt, Artificial Sequence
  Description of Artificial Sequence: Synthetic oligonucleotide
cuaacacucucuuccuguc

SEQ ID NO: 3541 - RNA, 19 nt, Artificial Sequence
  Description of Artificial Sequence: Synthetic oligonucleotide
ucuaacacucucuuccugu

SEQ ID NO: 3542 - RNA, 19 nt, Artificial Sequence
  Description of Artificial Sequence: Synthetic oligonucleotide
uucuaacacucucuuccug

SEQ ID NO: 3543 - RNA, 19 nt, Artificial Sequence
  Description of Artificial Sequence: Synthetic oligonucleotide
uuucuaacacucucuuccu

SEQ ID NO: 3544 - RNA, 19 nt, Artificial Sequence
  Description of Artificial Sequence: Synthetic oligonucleotide
cuuucuaacacucucuucc

SEQ ID NO: 3545 - RNA, 19 nt, Artificial Sequence
  Description of Artificial Sequence: Synthetic oligonucleotide
ccuuucuaacacucucuuc

SEQ ID NO: 3546 - RNA, 19 nt, Artificial Sequence
  Description of Artificial Sequence: Synthetic oligonucleotide
cccuuucuaacacucucuu

SEQ ID NO: 3547 - RNA, 19 nt, Artificial Sequence
  Description of Artificial Sequence: Synthetic oligonucleotide
acccuuucuaacacucucu

SEQ ID NO: 3548 - RNA, 19 nt, Artificial Sequence
  Description of Artificial Sequence: Synthetic oligonucleotide
uacccuuucuaacacucuc

SEQ ID NO: 3549 - RNA, 19 nt, Artificial Sequence
  Description of Artificial Sequence: Synthetic oligonucleotide
cuacccuuucuaacacucu

SEQ ID NO: 3550 - RNA, 19 nt, Artificial Sequence
  Description of Artificial Sequence: Synthetic oligonucleotide
ccuacccuuucuaacacuc

SEQ ID NO: 3551 - RNA, 19 nt, Artificial Sequence
  Description of Artificial Sequence: Synthetic oligonucleotide
uccuacccuuucuaacacu

SEQ ID NO: 3552 - RNA, 19 nt, Artificial Sequence
  Description of Artificial Sequence: Synthetic oligonucleotide
guccuacccuuucuaacac

SEQ ID NO: 3553 - RNA, 19 nt, Artificial Sequence
  Description of Artificial Sequence: Synthetic oligonucleotide
aguccuacccuuucuaaca

SEQ ID NO: 3554 - RNA, 19 nt, Artificial Sequence
  Description of Artificial Sequence: Synthetic oligonucleotide
caguccuacccuuucuaac

SEQ ID NO: 3555 - RNA, 19 nt, Artificial Sequence
  Description of Artificial Sequence: Synthetic oligonucleotide
ucaguccuacccuuucuaa

SEQ ID NO: 3556 - RNA, 19 nt, Artificial Sequence
  Description of Artificial Sequence: Synthetic oligonucleotide
cucaguccuacccuuucua

SEQ ID NO: 3557 - RNA, 19 nt, Artificial Sequence
  Description of Artificial Sequence: Synthetic oligonucleotide
ucucaguccuacccuuucu

SEQ ID NO: 3558 - RNA, 19 nt, Artificial Sequence
  Description of Artificial Sequence: Synthetic oligonucleotide
uucucaguccuacccuuuc

SEQ ID NO: 3559 - RNA, 19 nt, Artificial Sequence
  Description of Artificial Sequence: Synthetic oligonucleotide
uuucucaguccuacccuuu

SEQ ID NO: 3560 - RNA, 19 nt, Artificial Sequence
  Description of Artificial Sequence: Synthetic oligonucleotide
guuucucaguccuacccuu

SEQ ID NO: 3561 - RNA, 19 nt, Artificial Sequence
  Description of Artificial Sequence: Synthetic oligonucleotide
uguuucucaguccuacccu

SEQ ID NO: 3562 - RNA, 19 nt, Artificial Sequence
  Description of Artificial Sequence: Synthetic oligonucleotide
cuguuucucaguccuaccc

SEQ ID NO: 3563 - RNA, 19 nt, Artificial Sequence
  Description of Artificial Sequence: Synthetic oligonucleotide
gcuguuucucaguccuacc

SEQ ID NO: 3564 - RNA, 19 nt, Artificial Sequence
  Description of Artificial Sequence: Synthetic oligonucleotide
ggcuguuucucaguccuac

SEQ ID NO: 3565 - RNA, 19 nt, Artificial Sequence
  Description of Artificial Sequence: Synthetic oligonucleotide
aggcuguuucucaguccua

SEQ ID NO: 3566 - RNA, 19 nt, Artificial Sequence
  Description of Artificial Sequence: Synthetic oligonucleotide
uaggcuguuucucaguccu

SEQ ID NO: 3567 - RNA, 19 nt, Artificial Sequence
  Description of Artificial Sequence: Synthetic oligonucleotide
auaggcuguuucucagucc

SEQ ID NO: 3568 - RNA, 19 nt, Artificial Sequence
  Description of Artificial Sequence: Synthetic oligonucleotide
uauaggcuguuucucaguc

SEQ ID NO: 3569 - RNA, 19 nt, Artificial Sequence
  Description of Artificial Sequence: Synthetic oligonucleotide
uuauaggcuguuucucagu

SEQ ID NO: 3570 - RNA, 19 nt, Artificial Sequence
  Description of Artificial Sequence: Synthetic oligonucleotide
auuauaggcuguuucucag

SEQ ID NO: 3571 - RNA, 19 nt, Artificial Sequence
  Description of Artificial Sequence: Synthetic oligonucleotide
gauuauaggcuguuucuca

SEQ ID NO: 3572 - RNA, 19 nt, Artificial Sequence
  Description of Artificial Sequence: Synthetic oligonucleotide
agauuauaggcuguuucuc

SEQ ID NO: 3573 - RNA, 19 nt, Artificial Sequence
  Description of Artificial Sequence: Synthetic oligonucleotide
gagauuauaggcuguuucu

SEQ ID NO: 3574 - RNA, 19 nt, Artificial Sequence
  Description of Artificial Sequence: Synthetic oligonucleotide
ggagauuauaggcuguuuc

SEQ ID NO: 3575 - RNA, 19 nt, Artificial Sequence
  Description of Artificial Sequence: Synthetic oligonucleotide
uggagauuauaggcuguuu

SEQ ID NO: 3576 - RNA, 19 nt, Artificial Sequence
  Description of Artificial Sequence: Synthetic oligonucleotide
uuggagauuauaggcuguu

SEQ ID NO: 3577 - RNA, 19 nt, Artificial Sequence
  Description of Artificial Sequence: Synthetic oligonucleotide
uuuggagauuauaggcugu

SEQ ID NO: 3578 - RNA, 19 nt, Artificial Sequence
  Description of Artificial Sequence: Synthetic oligonucleotide
cuuuggagauuauaggcug

SEQ ID NO: 3579 - RNA, 19 nt, Artificial Sequence
  Description of Artificial Sequence: Synthetic oligonucleotide
ucuuuggagauuauaggcu

SEQ ID NO: 3580 - RNA, 19 nt, Artificial Sequence
  Description of Artificial Sequence: Synthetic oligonucleotide
uucuuuggagauuauaggc

SEQ ID NO: 3581 - RNA, 19 nt, Artificial Sequence
  Description of Artificial Sequence: Synthetic oligonucleotide
uuucuuuggagauuauagg

SEQ ID NO: 3582 - RNA, 19 nt, Artificial Sequence
  Description of Artificial Sequence: Synthetic oligonucleotide
cuuucuuuggagauuauag

SEQ ID NO: 3583 - RNA, 19 nt, Artificial Sequence
  Description of Artificial Sequence: Synthetic oligonucleotide
ucuuucuuuggagauuaua

SEQ ID NO: 3584 - RNA, 19 nt, Artificial Sequence
  Description of Artificial Sequence: Synthetic oligonucleotide
uucuuucuuuggagauuau

SEQ ID NO: 3585 - RNA, 19 nt, Artificial Sequence
  Description of Artificial Sequence: Synthetic oligonucleotide
auucuuucuuuggagauua

SEQ ID NO: 3586 - RNA, 19 nt, Artificial Sequence
  Description of Artificial Sequence: Synthetic oligonucleotide
uauucuuucuuuggagauu

SEQ ID NO: 3587 - RNA, 19 nt, Artificial Sequence
  Description of Artificial Sequence: Synthetic oligonucleotide
uuauucuuucuuuggagau

SEQ ID NO: 3588 - RNA, 19 nt, Artificial Sequence
  Description of Artificial Sequence: Synthetic oligonucleotide
cuuauucuuucuuuggaga

SEQ ID NO: 3589 - RNA, 19 nt, Artificial Sequence
  Description of Artificial Sequence: Synthetic oligonucleotide
acuuauucuuucuuuggag

SEQ ID NO: 3590 - RNA, 19 nt, Artificial Sequence
  Description of Artificial Sequence: Synthetic oligonucleotide
gacuuauucuuucuuugga

SEQ ID NO: 3591 - RNA, 19 nt, Artificial Sequence
  Description of Artificial Sequence: Synthetic oligonucleotide
agacuuauucuuucuuugg

SEQ ID NO: 3592 - RNA, 19 nt, Artificial Sequence
  Description of Artificial Sequence: Synthetic oligonucleotide
gagacuuauucuuucuuug

SEQ ID NO: 3593 - RNA, 19 nt, Artificial Sequence
  Description of Artificial Sequence: Synthetic oligonucleotide
ggagacuuauucuuucuuu

SEQ ID NO: 3594 - RNA, 19 nt, Artificial Sequence
  Description of Artificial Sequence: Synthetic oligonucleotide
uggagacuuauucuuucuu

SEQ ID NO: 3595 - RNA, 19 nt, Artificial Sequence
  Description of Artificial Sequence: Synthetic oligonucleotide
uuggagacuuauucuuucu

SEQ ID NO: 3596 - RNA, 19 nt, Artificial Sequence
  Description of Artificial Sequence: Synthetic oligonucleotide
cuuggagacuuauucuuuc

SEQ ID NO: 3597 - RNA, 19 nt, Artificial Sequence
  Description of Artificial Sequence: Synthetic oligonucleotide
ccuuggagacuuauucuuu

SEQ ID NO: 3598 - RNA, 19 nt, Artificial Sequence
  Description of Artificial Sequence: Synthetic oligonucleotide
uccuuggagacuuauucuu

SEQ ID NO: 3599 - RNA, 19 nt, Artificial Sequence
  Description of Artificial Sequence: Synthetic oligonucleotide
cuccuuggagacuuauucu

SEQ ID NO: 3600 - RNA, 19 nt, Artificial Sequence
  Description of Artificial Sequence: Synthetic oligonucleotide
gcuccuuggagacuuauuc

SEQ ID NO: 3601 - RNA, 19 nt, Artificial Sequence
  Description of Artificial Sequence: Synthetic oligonucleotide
ugcuccuuggagacuuauu

SEQ ID NO: 3602 - RNA, 19 nt, Artificial Sequence
  Description of Artificial Sequence: Synthetic oligonucleotide
gugcuccuuggagacuuau

SEQ ID NO: 3603 - RNA, 19 nt, Artificial Sequence
  Description of Artificial Sequence: Synthetic oligonucleotide
ugugcuccuuggagacuua

SEQ ID NO: 3604 - RNA, 19 nt, Artificial Sequence
  Description of Artificial Sequence: Synthetic oligonucleotide
uugugcuccuuggagacuu

SEQ ID NO: 3605 - RNA, 19 nt, Artificial Sequence
  Description of Artificial Sequence: Synthetic oligonucleotide
uuugugcuccuuggagacu

SEQ ID NO: 3606 - RNA, 19 nt, Artificial Sequence
  Description of Artificial Sequence: Synthetic oligonucleotide
uuuugugcuccuuggagac

SEQ ID NO: 3607 - RNA, 19 nt, Artificial Sequence
  Description of Artificial Sequence: Synthetic oligonucleotide
uuuuugugcuccuuggaga

SEQ ID NO: 3608 - RNA, 19 nt, Artificial Sequence
  Description of Artificial Sequence: Synthetic oligonucleotide
uuuuuugugcuccuuggag

SEQ ID NO: 3609 - RNA, 19 nt, Artificial Sequence
  Description of Artificial Sequence: Synthetic oligonucleotide
uuuuuuugugcuccuugga

SEQ ID NO: 3610 - RNA, 19 nt, Artificial Sequence
  Description of Artificial Sequence: Synthetic oligonucleotide
auuuuuuugugcuccuugg

SEQ ID NO: 3611 - RNA, 19 nt, Artificial Sequence
  Description of Artificial Sequence: Synthetic oligonucleotide
gauuuuuuugugcuccuug

SEQ ID NO: 3612 - RNA, 19 nt, Artificial Sequence
  Description of Artificial Sequence: Synthetic oligonucleotide
ugauuuuuuugugcuccuu

SEQ ID NO: 3613 - RNA, 19 nt, Artificial Sequence
  Description of Artificial Sequence: Synthetic oligonucleotide
augauuuuuuugugcuccu

SEQ ID NO: 3614 - RNA, 19 nt, Artificial Sequence
  Description of Artificial Sequence: Synthetic oligonucleotide
uaugauuuuuuugugcucc

SEQ ID NO: 3615 - RNA, 19 nt, Artificial Sequence
  Description of Artificial Sequence: Synthetic oligonucleotide
auaugauuuuuuugugcuc

SEQ ID NO: 3616 - RNA, 19 nt, Artificial Sequence
  Description of Artificial Sequence: Synthetic oligonucleotide
cauaugauuuuuuugugcu

SEQ ID NO: 3617 - RNA, 19 nt, Artificial Sequence
  Description of Artificial Sequence: Synthetic oligonucleotide
acauaugauuuuuuugugc

SEQ ID NO: 3618 - RNA, 19 nt, Artificial Sequence
  Description of Artificial Sequence: Synthetic oligonucleotide
uacauaugauuuuuuugug

SEQ ID NO: 3619 - RNA, 19 nt, Artificial Sequence
  Description of Artificial Sequence: Synthetic oligonucleotide
guacauaugauuuuuuugu

SEQ ID NO: 3620 - RNA, 19 nt, Artificial Sequence
  Description of Artificial Sequence: Synthetic oligonucleotide
gguacauaugauuuuuuug

SEQ ID NO: 3621 - RNA, 19 nt, Artificial Sequence
  Description of Artificial Sequence: Synthetic oligonucleotide
ugguacauaugauuuuuuu

SEQ ID NO: 3622 - RNA, 19 nt, Artificial Sequence
  Description of Artificial Sequence: Synthetic oligonucleotide
uugguacauaugauuuuuu

SEQ ID NO: 3623 - RNA, 19 nt, Artificial Sequence
  Description of Artificial Sequence: Synthetic oligonucleotide
cuugguacauaugauuuuu

SEQ ID NO: 3624 - RNA, 19 nt, Artificial Sequence
  Description of Artificial Sequence: Synthetic oligonucleotide
ccuugguacauaugauuuu

SEQ ID NO: 3625 - RNA, 19 nt, Artificial Sequence
  Description of Artificial Sequence: Synthetic oligonucleotide
uccuugguacauaugauuu

SEQ ID NO: 3626 - RNA, 19 nt, Artificial Sequence
  Description of Artificial Sequence: Synthetic oligonucleotide
auccuugguacauaugauu

SEQ ID NO: 3627 - RNA, 19 nt, Artificial Sequence
  Description of Artificial Sequence: Synthetic oligonucleotide
cauccuugguacauaugau

SEQ ID NO: 3628 - RNA, 19 nt, Artificial Sequence
  Description of Artificial Sequence: Synthetic oligonucleotide
acauccuugguacauauga

SEQ ID NO: 3629 - RNA, 19 nt, Artificial Sequence
  Description of Artificial Sequence: Synthetic oligonucleotide
aacauccuugguacauaug

SEQ ID NO: 3630 - RNA, 19 nt, Artificial Sequence
  Description of Artificial Sequence: Synthetic oligonucleotide
uaacauccuugguacauau

SEQ ID NO: 3631 - RNA, 19 nt, Artificial Sequence
  Description of Artificial Sequence: Synthetic oligonucleotide
guaacauccuugguacaua

SEQ ID NO: 3632 - RNA, 19 nt, Artificial Sequence
  Description of Artificial Sequence: Synthetic oligonucleotide
uguaacauccuugguacau

SEQ ID NO: 3633 - RNA, 19 nt, Artificial Sequence
  Description of Artificial Sequence: Synthetic oligonucleotide
cuguaacauccuugguaca

SEQ ID NO: 3634 - RNA, 19 nt, Artificial Sequence
  Description of Artificial Sequence: Synthetic oligonucleotide
acuguaacauccuugguac

SEQ ID NO: 3635 - RNA, 19 nt, Artificial Sequence
  Description of Artificial Sequence: Synthetic oligonucleotide
uacuguaacauccuuggua

SEQ ID NO: 3636 - RNA, 19 nt, Artificial Sequence
  Description of Artificial Sequence: Synthetic oligonucleotide
uuacuguaacauccuuggu

SEQ ID NO: 3637 - RNA, 19 nt, Artificial Sequence
  Description of Artificial Sequence: Synthetic oligonucleotide
uuuacuguaacauccuugg

SEQ ID NO: 3638 - RNA, 19 nt, Artificial Sequence
  Description of Artificial Sequence: Synthetic oligonucleotide
guuuacuguaacauccuug

SEQ ID NO: 3639 - RNA, 19 nt, Artificial Sequence
  Description of Artificial Sequence: Synthetic oligonucleotide
uguuuacuguaacauccuu

SEQ ID NO: 3640 - RNA, 19 nt, Artificial Sequence
  Description of Artificial Sequence: Synthetic oligonucleotide
cuguuuacuguaacauccu

SEQ ID NO: 3641 - RNA, 19 nt, Artificial Sequence
  Description of Artificial Sequence: Synthetic oligonucleotide
ccuguuuacuguaacaucc

SEQ ID NO: 3642 - RNA, 19 nt, Artificial Sequence
  Description of Artificial Sequence: Synthetic oligonucleotide
uccuguuuacuguaacauc

SEQ ID NO: 3643 - RNA, 19 nt, Artificial Sequence
  Description of Artificial Sequence: Synthetic oligonucleotide
auccuguuuacuguaacau

SEQ ID NO: 3644 - RNA, 19 nt, Artificial Sequence
  Description of Artificial Sequence: Synthetic oligonucleotide
cauccuguuuacuguaaca

SEQ ID NO: 3645 - RNA, 19 nt, Artificial Sequence
  Description of Artificial Sequence: Synthetic oligonucleotide
ucauccuguuuacuguaac

SEQ ID NO: 3646 - RNA, 19 nt, Artificial Sequence
  Description of Artificial Sequence: Synthetic oligonucleotide
uucauccuguuuacuguaa

SEQ ID NO: 3647 - RNA, 19 nt, Artificial Sequence
  Description of Artificial Sequence: Synthetic oligonucleotide
guucauccuguuuacugua

SEQ ID NO: 3648 - RNA, 19 nt, Artificial Sequence
  Description of Artificial Sequence: Synthetic oligonucleotide
aguucauccuguuuacugu

SEQ ID NO: 3649 - RNA, 19 nt, Artificial Sequence
  Description of Artificial Sequence: Synthetic oligonucleotide
uaguucauccuguuuacug

SEQ ID NO: 3650 - RNA, 19 nt, Artificial Sequence
  Description of Artificial Sequence: Synthetic oligonucleotide
auaguucauccuguuuacu

SEQ ID NO: 3651 - RNA, 19 nt, Artificial Sequence
  Description of Artificial Sequence: Synthetic oligonucleotide
aauaguucauccuguuuac

SEQ ID NO: 3652 - RNA, 19 nt, Artificial Sequence
  Description of Artificial Sequence: Synthetic oligonucleotide
aaauaguucauccuguuua

SEQ ID NO: 3653 - RNA, 19 nt, Artificial Sequence
  Description of Artificial Sequence: Synthetic oligonucleotide
uaaauaguucauccuguuu

SEQ ID NO: 3654 - RNA, 19 nt, Artificial Sequence
  Description of Artificial Sequence: Synthetic oligonucleotide
uuaaauaguucauccuguu

SEQ ID NO: 3655 - RNA, 19 nt, Artificial Sequence
  Description of Artificial Sequence: Synthetic oligonucleotide
uuuaaauaguucauccugu

SEQ ID NO: 3656 - RNA, 19 nt, Artificial Sequence
  Description of Artificial Sequence: Synthetic oligonucleotide
guuuaaauaguucauccug

SEQ ID NO: 3657 - RNA, 19 nt, Artificial Sequence
  Description of Artificial Sequence: Synthetic oligonucleotide
gguuuaaauaguucauccu

SEQ ID NO: 3658 - RNA, 19 nt, Artificial Sequence
  Description of Artificial Sequence: Synthetic oligonucleotide
ggguuuaaauaguucaucc

SEQ ID NO: 3659 - RNA, 19 nt, Artificial Sequence
  Description of Artificial Sequence: Synthetic oligonucleotide
uggguuuaaauaguucauc

SEQ ID NO: 3660 - RNA, 19 nt, Artificial Sequence
  Description of Artificial Sequence: Synthetic oligonucleotide
guggguuuaaauaguucau

SEQ ID NO: 3661 - RNA, 19 nt, Artificial Sequence
  Description of Artificial Sequence: Synthetic oligonucleotide
aguggguuuaaauaguuca

SEQ ID NO: 3662 - RNA, 19 nt, Artificial Sequence
  Description of Artificial Sequence: Synthetic oligonucleotide
caguggguuuaaauaguuc

SEQ ID NO: 3663 - RNA, 19 nt, Artificial Sequence
  Description of Artificial Sequence: Synthetic oligonucleotide
ccaguggguuuaaauaguu

SEQ ID NO: 3664 - RNA, 19 nt, Artificial Sequence
  Description of Artificial Sequence: Synthetic oligonucleotide
cccaguggguuuaaauagu

SEQ ID NO: 3665 - RNA, 19 nt, Artificial Sequence
  Description of Artificial Sequence: Synthetic oligonucleotide
acccaguggguuuaaauag

SEQ ID NO: 3666 - RNA, 19 nt, Artificial Sequence
  Description of Artificial Sequence: Synthetic oligonucleotide
gacccaguggguuuaaaua

SEQ ID NO: 3667 - RNA, 19 nt, Artificial Sequence
  Description of Artificial Sequence: Synthetic oligonucleotide
ggacccaguggguuuaaau

SEQ ID NO: 3668 - RNA, 19 nt, Artificial Sequence
  Description of Artificial Sequence: Synthetic oligonucleotide
aggacccaguggguuuaaa

SEQ ID NO: 3669 - RNA, 19 nt, Artificial Sequence
  Description of Artificial Sequence: Synthetic oligonucleotide
caggacccaguggguuuaa

SEQ ID NO: 3670 - RNA, 19 nt, Artificial Sequence
  Description of Artificial Sequence: Synthetic oligonucleotide
gcaggacccaguggguuua

SEQ ID NO: 3671 - RNA, 19 nt, Artificial Sequence
  Description of Artificial Sequence: Synthetic oligonucleotide
ggcaggacccaguggguuu

SEQ ID NO: 3672 - RNA, 19 nt, Artificial Sequence
  Description of Artificial Sequence: Synthetic oligonucleotide
uggcaggacccaguggguu

SEQ ID NO: 3673 - RNA, 19 nt, Artificial Sequence
  Description of Artificial Sequence: Synthetic oligonucleotide
guggcaggacccagugggu

SEQ ID NO: 3674 - RNA, 19 nt, Artificial Sequence
  Description of Artificial Sequence: Synthetic oligonucleotide
uguggcaggacccaguggg

SEQ ID NO: 3675 - RNA, 19 nt, Artificial Sequence
  Description of Artificial Sequence: Synthetic oligonucleotide
auguggcaggacccagugg

SEQ ID NO: 3676 - RNA, 19 nt, Artificial Sequence
  Description of Artificial Sequence: Synthetic oligonucleotide
gauguggcaggacccagug

SEQ ID NO: 3677 - RNA, 19 nt, Artificial Sequence
  Description of Artificial Sequence: Synthetic oligonucleotide
ggauguggcaggacccagu

SEQ ID NO: 3678 - RNA, 19 nt, Artificial Sequence
  Description of Artificial Sequence: Synthetic oligonucleotide
aggauguggcaggacccag

SEQ ID NO: 3679 - RNA, 19 nt, Artificial Sequence
  Description of Artificial Sequence: Synthetic oligonucleotide
aaggauguggcaggaccca

SEQ ID NO: 3680 - RNA, 19 nt, Artificial Sequence
  Description of Artificial Sequence: Synthetic oligonucleotide
gaaggauguggcaggaccc

SEQ ID NO: 3681 - RNA, 19 nt, Artificial Sequence
  Description of Artificial Sequence: Synthetic oligonucleotide
agaaggauguggcaggacc

SEQ ID NO: 3682 - RNA, 19 nt, Artificial Sequence
  Description of Artificial Sequence: Synthetic oligonucleotide
gagaaggauguggcaggac

SEQ ID NO: 3683 - RNA, 19 nt, Artificial Sequence
  Description of Artificial Sequence: Synthetic oligonucleotide
ugagaaggauguggcagga

SEQ ID NO: 3684 - RNA, 19 nt, Artificial Sequence
  Description of Artificial Sequence: Synthetic oligonucleotide
uugagaaggauguggcagg

SEQ ID NO: 3685 - RNA, 19 nt, Artificial Sequence
  Description of Artificial Sequence: Synthetic oligonucleotide
cuugagaaggauguggcag

SEQ ID NO: 3686 - RNA, 19 nt, Artificial Sequence
  Description of Artificial Sequence: Synthetic oligonucleotide
ccuugagaaggauguggca

SEQ ID NO: 3687 - RNA, 19 nt, Artificial Sequence
  Description of Artificial Sequence: Synthetic oligonucleotide
accuugagaaggauguggc

SEQ ID NO: 3688 - RNA, 19 nt, Artificial Sequence
  Description of Artificial Sequence: Synthetic oligonucleotide
caccuugagaaggaugugg

SEQ ID NO: 3689 - RNA, 19 nt, Artificial Sequence
  Description of Artificial Sequence: Synthetic oligonucleotide
ccaccuugagaaggaugug

SEQ ID NO: 3690 - RNA, 19 nt, Artificial Sequence
  Description of Artificial Sequence: Synthetic oligonucleotide
accaccuugagaaggaugu

SEQ ID NO: 3691 - RNA, 19 nt, Artificial Sequence
  Description of Artificial Sequence: Synthetic oligonucleotide
uaccaccuugagaaggaug

SEQ ID NO: 3692 - RNA, 19 nt, Artificial Sequence
  Description of Artificial Sequence: Synthetic oligonucleotide
cuaccaccuugagaaggau

SEQ ID NO: 3693 - RNA, 19 nt, Artificial Sequence
  Description of Artificial Sequence: Synthetic oligonucleotide
ucuaccaccuugagaagga

SEQ ID NO: 3694 - RNA, 19 nt, Artificial Sequence
  Description of Artificial Sequence: Synthetic oligonucleotide
gucuaccaccuugagaagg

SEQ ID NO: 3695 - RNA, 19 nt, Artificial Sequence
  Description of Artificial Sequence: Synthetic oligonucleotide
agucuaccaccuugagaag

SEQ ID NO: 3696 - RNA, 19 nt, Artificial Sequence
  Description of Artificial Sequence: Synthetic oligonucleotide
cagucuaccaccuugagaa

SEQ ID NO: 3697 - RNA, 19 nt, Artificial Sequence
  Description of Artificial Sequence: Synthetic oligonucleotide
ucagucuaccaccuugaga

SEQ ID NO: 3698 - RNA, 19 nt, Artificial Sequence
  Description of Artificial Sequence: Synthetic oligonucleotide
cucagucuaccaccuugag

SEQ ID NO: 3699 - RNA, 19 nt, Artificial Sequence
  Description of Artificial Sequence: Synthetic oligonucleotide
acucagucuaccaccuuga

SEQ ID NO: 3700 - RNA, 19 nt, Artificial Sequence
  Description of Artificial Sequence: Synthetic oligonucleotide
cacucagucuaccaccuug

SEQ ID NO: 3701 - RNA, 19 nt, Artificial Sequence
  Description of Artificial Sequence: Synthetic oligonucleotide
ccacucagucuaccaccuu

SEQ ID NO: 3702 - RNA, 19 nt, Artificial Sequence
  Description of Artificial Sequence: Synthetic oligonucleotide
cccacucagucuaccaccu

SEQ ID NO: 3703 - RNA, 19 nt, Artificial Sequence
  Description of Artificial Sequence: Synthetic oligonucleotide
ccccacucagucuaccacc

SEQ ID NO: 3704 - RNA, 19 nt, Artificial Sequence
  Description of Artificial Sequence: Synthetic oligonucleotide
accccacucagucuaccac

SEQ ID NO: 3705 - RNA, 19 nt, Artificial Sequence
  Description of Artificial Sequence: Synthetic oligonucleotide
gaccccacucagucuacca

SEQ ID NO: 3706 - RNA, 19 nt, Artificial Sequence
  Description of Artificial Sequence: Synthetic oligonucleotide
agaccccacucagucuacc

SEQ ID NO: 3707 - RNA, 19 nt, Artificial Sequence
  Description of Artificial Sequence: Synthetic oligonucleotide
gagaccccacucagucuac

SEQ ID NO: 3708 - RNA, 19 nt, Artificial Sequence
  Description of Artificial Sequence: Synthetic oligonucleotide
agagaccccacucagucua

SEQ ID NO: 3709 - RNA, 19 nt, Artificial Sequence
  Description of Artificial Sequence: Synthetic oligonucleotide
gagagaccccacucagucu

SEQ ID NO: 3710 - RNA, 19 nt, Artificial Sequence
  Description of Artificial Sequence: Synthetic oligonucleotide
agagagaccccacucaguc

SEQ ID NO: 3711 - RNA, 19 nt, Artificial Sequence
  Description of Artificial Sequence: Synthetic oligonucleotide
cagagagaccccacucagu

SEQ ID NO: 3712 - RNA, 19 nt, Artificial Sequence
  Description of Artificial Sequence: Synthetic oligonucleotide
gcagagagaccccacucag

SEQ ID NO: 3713 - RNA, 19 nt, Artificial Sequence
  Description of Artificial Sequence: Synthetic oligonucleotide
ggcagagagaccccacuca

SEQ ID NO: 3714 - RNA, 19 nt, Artificial Sequence
  Description of Artificial Sequence: Synthetic oligonucleotide
gggcagagagaccccacuc

SEQ ID NO: 3715 - RNA, 19 nt, Artificial Sequence
  Description of Artificial Sequence: Synthetic oligonucleotide
ugggcagagagaccccacu

SEQ ID NO: 3716 - RNA, 19 nt, Artificial Sequence
  Description of Artificial Sequence: Synthetic oligonucleotide
uugggcagagagaccccac

SEQ ID NO: 3717 - RNA, 19 nt, Artificial Sequence
  Description of Artificial Sequence: Synthetic oligonucleotide
cuugggcagagagacccca

SEQ ID NO: 3718 - RNA, 19 nt, Artificial Sequence
  Description of Artificial Sequence: Synthetic oligonucleotide
ucuugggcagagagacccc

SEQ ID NO: 3719 - RNA, 19 nt, Artificial Sequence
  Description of Artificial Sequence: Synthetic oligonucleotide
aucuugggcagagagaccc

SEQ ID NO: 3720 - RNA, 19 nt, Artificial Sequence
  Description of Artificial Sequence: Synthetic oligonucleotide
gaucuugggcagagagacc

SEQ ID NO: 3721 - RNA, 19 nt, Artificial Sequence
  Description of Artificial Sequence: Synthetic oligonucleotide
ggaucuugggcagagagac

SEQ ID NO: 3722 - RNA, 19 nt, Artificial Sequence
  Description of Artificial Sequence: Synthetic oligonucleotide
gggaucuugggcagagaga

SEQ ID NO: 3723 - RNA, 19 nt, Artificial Sequence
  Description of Artificial Sequence: Synthetic oligonucleotide
agggaucuugggcagagag

SEQ ID NO: 3724 - RNA, 19 nt, Artificial Sequence
  Description of Artificial Sequence: Synthetic oligonucleotide
cagggaucuugggcagaga

SEQ ID NO: 3725 - RNA, 19 nt, Artificial Sequence
  Description of Artificial Sequence: Synthetic oligonucleotide
ucagggaucuugggcagag

SEQ ID NO: 3726 - RNA, 19 nt, Artificial Sequence
  Description of Artificial Sequence: Synthetic oligonucleotide
gucagggaucuugggcaga

SEQ ID NO: 3727 - RNA, 19 nt, Artificial Sequence
  Description of Artificial Sequence: Synthetic oligonucleotide
ugucagggaucuugggcag

SEQ ID NO: 3728 - RNA, 19 nt, Artificial Sequence
  Description of Artificial Sequence: Synthetic oligonucleotide
augucagggaucuugggca

SEQ ID NO: 3729 - RNA, 19 nt, Artificial Sequence
  Description of Artificial Sequence: Synthetic oligonucleotide
uaugucagggaucuugggc

SEQ ID NO: 3730 - RNA, 19 nt, Artificial Sequence
  Description of Artificial Sequence: Synthetic oligonucleotide
cuaugucagggaucuuggg

SEQ ID NO: 3731 - RNA, 19 nt, Artificial Sequence
  Description of Artificial Sequence: Synthetic oligonucleotide
gcuaugucagggaucuugg

SEQ ID NO: 3732 - RNA, 19 nt, Artificial Sequence
  Description of Artificial Sequence: Synthetic oligonucleotide
ugcuaugucagggaucuug

SEQ ID NO: 3733 - RNA, 19 nt, Artificial Sequence
  Description of Artificial Sequence: Synthetic oligonucleotide
cugcuaugucagggaucuu

SEQ ID NO: 3734 - RNA, 19 nt, Artificial Sequence
  Description of Artificial Sequence: Synthetic oligonucleotide
acugcuaugucagggaucu

SEQ ID NO: 3735 - RNA, 19 nt, Artificial Sequence
  Description of Artificial Sequence: Synthetic oligonucleotide
uacugcuaugucagggauc

SEQ ID NO: 3736 - RNA, 19 nt, Artificial Sequence
  Description of Artificial Sequence: Synthetic oligonucleotide
cuacugcuaugucagggau

SEQ ID NO: 3737 - RNA, 19 nt, Artificial Sequence
  Description of Artificial Sequence: Synthetic oligonucleotide
gcuacugcuaugucaggga

SEQ ID NO: 3738 - RNA, 19 nt, Artificial Sequence
  Description of Artificial Sequence: Synthetic oligonucleotide
agcuacugcuaugucaggg

SEQ ID NO: 3739 - RNA, 19 nt, Artificial Sequence
  Description of Artificial Sequence: Synthetic oligonucleotide
aagcuacugcuaugucagg

SEQ ID NO: 3740 - RNA, 19 nt, Artificial Sequence
  Description of Artificial Sequence: Synthetic oligonucleotide
caagcuacugcuaugucag

SEQ ID NO: 3741 - RNA, 19 nt, Artificial Sequence
  Description of Artificial Sequence: Synthetic oligonucleotide
acaagcuacugcuauguca

SEQ ID NO: 3742 - RNA, 19 nt, Artificial Sequence
  Description of Artificial Sequence: Synthetic oligonucleotide
gacaagcuacugcuauguc

SEQ ID NO: 3743 - RNA, 19 nt, Artificial Sequence
  Description of Artificial Sequence: Synthetic oligonucleotide
agacaagcuacugcuaugu

SEQ ID NO: 3744 - RNA, 19 nt, Artificial Sequence
  Description of Artificial Sequence: Synthetic oligonucleotide
aagacaagcuacugcuaug

SEQ ID NO: 3745 - RNA, 19 nt, Artificial Sequence
  Description of Artificial Sequence: Synthetic oligonucleotide
aaagacaagcuacugcuau

SEQ ID NO: 3746 - RNA, 19 nt, Artificial Sequence
  Description of Artificial Sequence: Synthetic oligonucleotide
aaaagacaagcuacugcua

SEQ ID NO: 3747 - RNA, 19 nt, Artificial Sequence
  Description of Artificial Sequence: Synthetic oligonucleotide
gaaaagacaagcuacugcu

SEQ ID NO: 3748 - RNA, 19 nt, Artificial Sequence
  Description of Artificial Sequence: Synthetic oligonucleotide
ggaaaagacaagcuacugc

SEQ ID NO: 3749 - RNA, 19 nt, Artificial Sequence
  Description of Artificial Sequence: Synthetic oligonucleotide
uggaaaagacaagcuacug

SEQ ID NO: 3750 - RNA, 19 nt, Artificial Sequence
  Description of Artificial Sequence: Synthetic oligonucleotide
guggaaaagacaagcuacu

SEQ ID NO: 3751 - RNA, 19 nt, Artificial Sequence
  Description of Artificial Sequence: Synthetic oligonucleotide
uguggaaaagacaagcuac

SEQ ID NO: 3752 - RNA, 19 nt, Artificial Sequence
  Description of Artificial Sequence: Synthetic oligonucleotide
auguggaaaagacaagcua

SEQ ID NO: 3753 - RNA, 19 nt, Artificial Sequence
  Description of Artificial Sequence: Synthetic oligonucleotide
cauguggaaaagacaagcu

SEQ ID NO: 3754 - RNA, 19 nt, Artificial Sequence
  Description of Artificial Sequence: Synthetic oligonucleotide
ucauguggaaaagacaagc

SEQ ID NO: 3755 - RNA, 19 nt, Artificial Sequence
  Description of Artificial Sequence: Synthetic oligonucleotide
aucauguggaaaagacaag

SEQ ID NO: 3756 - RNA, 19 nt, Artificial Sequence
  Description of Artificial Sequence: Synthetic oligonucleotide
aaucauguggaaaagacaa

SEQ ID NO: 3757 - RNA, 19 nt, Artificial Sequence
  Description of Artificial Sequence: Synthetic oligonucleotide
aaaucauguggaaaagaca

SEQ ID NO: 3758 - RNA, 19 nt, Artificial Sequence
  Description of Artificial Sequence: Synthetic oligonucleotide
caaaucauguggaaaagac

SEQ ID NO: 3759 - RNA, 19 nt, Artificial Sequence
  Description of Artificial Sequence: Synthetic oligonucleotide
acaaaucauguggaaaaga

SEQ ID NO: 3760 - RNA, 19 nt, Artificial Sequence
  Description of Artificial Sequence: Synthetic oligonucleotide
gacaaaucauguggaaaag

SEQ ID NO: 3761 - RNA, 19 nt, Artificial Sequence
  Description of Artificial Sequence: Synthetic oligonucleotide
agacaaaucauguggaaaa

SEQ ID NO: 3762 - RNA, 19 nt, Artificial Sequence
  Description of Artificial Sequence: Synthetic oligonucleotide
cagacaaaucauguggaaa

SEQ ID NO: 3763 - RNA, 19 nt, Artificial Sequence
  Description of Artificial Sequence: Synthetic oligonucleotide
acagacaaaucauguggaa

SEQ ID NO: 3764 - RNA, 19 nt, Artificial Sequence
  Description of Artificial Sequence: Synthetic oligonucleotide
cacagacaaaucaugugga

SEQ ID NO: 3765 - RNA, 19 nt, Artificial Sequence
  Description of Artificial Sequence: Synthetic oligonucleotide
ucacagacaaaucaugugg

SEQ ID NO: 3766 - RNA, 19 nt, Artificial Sequence
  Description of Artificial Sequence: Synthetic oligonucleotide
uucacagacaaaucaugug

SEQ ID NO: 3767 - RNA, 19 nt, Artificial Sequence
  Description of Artificial Sequence: Synthetic oligonucleotide
uuucacagacaaaucaugu

SEQ ID NO: 3768 - RNA, 19 nt, Artificial Sequence
  Description of Artificial Sequence: Synthetic oligonucleotide
cuuucacagacaaaucaug

SEQ ID NO: 3769 - RNA, 19 nt, Artificial Sequence
  Description of Artificial Sequence: Synthetic oligonucleotide
ucuuucacagacaaaucau

SEQ ID NO: 3770 - RNA, 19 nt, Artificial Sequence
  Description of Artificial Sequence: Synthetic oligonucleotide
uucuuucacagacaaauca

SEQ ID NO: 3771 - RNA, 19 nt, Artificial Sequence
  Description of Artificial Sequence: Synthetic oligonucleotide
uuucuuucacagacaaauc

SEQ ID NO: 3772 - RNA, 19 nt, Artificial Sequence
  Description of Artificial Sequence: Synthetic oligonucleotide
uuuucuuucacagacaaau

SEQ ID NO: 3773 - RNA, 19 nt, Artificial Sequence
  Description of Artificial Sequence: Synthetic oligonucleotide
auuuucuuucacagacaaa

SEQ ID NO: 3774 - RNA, 19 nt, Artificial Sequence
  Description of Artificial Sequence: Synthetic oligonucleotide
uauuuucuuucacagacaa

SEQ ID NO: 3775 - RNA, 19 nt, Artificial Sequence
  Description of Artificial Sequence: Synthetic oligonucleotide
uuauuuucuuucacagaca

SEQ ID NO: 3776 - RNA, 19 nt, Artificial Sequence
  Description of Artificial Sequence: Synthetic oligonucleotide
auuauuuucuuucacagac

SEQ ID NO: 3777 - RNA, 19 nt, Artificial Sequence
  Description of Artificial Sequence: Synthetic oligonucleotide
aauuauuuucuuucacaga

SEQ ID NO: 3778 - RNA, 19 nt, Artificial Sequence
  Description of Artificial Sequence: Synthetic oligonucleotide
aaauuauuuucuuucacag

SEQ ID NO: 3779 - RNA, 19 nt, Artificial Sequence
  Description of Artificial Sequence: Synthetic oligonucleotide
aaaauuauuuucuuucaca

SEQ ID NO: 3780 - RNA, 19 nt, Artificial Sequence
  Description of Artificial Sequence: Synthetic oligonucleotide
caaaauuauuuucuuucac

SEQ ID NO: 3781 - RNA, 19 nt, Artificial Sequence
  Description of Artificial Sequence: Synthetic oligonucleotide
ucaaaauuauuuucuuuca

SEQ ID NO: 3782 - RNA, 19 nt, Artificial Sequence
  Description of Artificial Sequence: Synthetic oligonucleotide
cucaaaauuauuuucuuuc

SEQ ID NO: 3783 - RNA, 19 nt, Artificial Sequence
  Description of Artificial Sequence: Synthetic oligonucleotide
ucucaaaauuauuuucuuu

SEQ ID NO: 3784 - RNA, 19 nt, Artificial Sequence
  Description of Artificial Sequence: Synthetic oligonucleotide
aucucaaaauuauuuucuu

SEQ ID NO: 3785 - RNA, 19 nt, Artificial Sequence
  Description of Artificial Sequence: Synthetic oligonucleotide
gaucucaaaauuauuuucu

SEQ ID NO: 3786 - RNA, 19 nt, Artificial Sequence
  Description of Artificial Sequence: Synthetic oligonucleotide
cgaucucaaaauuauuuuc

SEQ ID NO: 3787 - RNA, 19 nt, Artificial Sequence
  Description of Artificial Sequence: Synthetic oligonucleotide
acgaucucaaaauuauuuu

SEQ ID NO: 3788 - RNA, 19 nt, Artificial Sequence
  Description of Artificial Sequence: Synthetic oligonucleotide
aacgaucucaaaauuauuu

SEQ ID NO: 3789 - RNA, 19 nt, Artificial Sequence
  Description of Artificial Sequence: Synthetic oligonucleotide
aaacgaucucaaaauuauu

SEQ ID NO: 3790 - RNA, 19 nt, Artificial Sequence
  Description of Artificial Sequence: Synthetic oligonucleotide
aaaacgaucucaaaauuau

SEQ ID NO: 3791 - RNA, 19 nt, Artificial Sequence
  Description of Artificial Sequence: Synthetic oligonucleotide
uaaaacgaucucaaaauua

SEQ ID NO: 3792 - RNA, 19 nt, Artificial Sequence
  Description of Artificial Sequence: Synthetic oligonucleotide
auaaaacgaucucaaaauu

SEQ ID NO: 3793 - RNA, 19 nt, Artificial Sequence
  Description of Artificial Sequence: Synthetic oligonucleotide
gauaaaacgaucucaaaau

SEQ ID NO: 3794 - RNA, 19 nt, Artificial Sequence
  Description of Artificial Sequence: Synthetic oligonucleotide
agauaaaacgaucucaaaa

SEQ ID NO: 3795 - RNA, 19 nt, Artificial Sequence
  Description of Artificial Sequence: Synthetic oligonucleotide
uagauaaaacgaucucaaa

SEQ ID NO: 3796 - RNA, 19 nt, Artificial Sequence
  Description of Artificial Sequence: Synthetic oligonucleotide
auagauaaaacgaucucaa

SEQ ID NO: 3797 - RNA, 19 nt, Artificial Sequence
  Description of Artificial Sequence: Synthetic oligonucleotide
aauagauaaaacgaucuca

SEQ ID NO: 3798 - RNA, 19 nt, Artificial Sequence
  Description of Artificial Sequence: Synthetic oligonucleotide
aaauagauaaaacgaucuc

SEQ ID NO: 3799 - RNA, 19 nt, Artificial Sequence
  Description of Artificial Sequence: Synthetic oligonucleotide
aaaauagauaaaacgaucu

SEQ ID NO: 3800 - RNA, 19 nt, Artificial Sequence
  Description of Artificial Sequence: Synthetic oligonucleotide
gaaaauagauaaaacgauc

SEQ ID NO: 3801 - RNA, 19 nt, Artificial Sequence
  Description of Artificial Sequence: Synthetic oligonucleotide
agaaaauagauaaaacgau

SEQ ID NO: 3802 - RNA, 19 nt, Artificial Sequence
  Description of Artificial Sequence: Synthetic oligonucleotide
gagaaaauagauaaaacga

SEQ ID NO: 3803 - RNA, 19 nt, Artificial Sequence
  Description of Artificial Sequence: Synthetic oligonucleotide
agagaaaauagauaaaacg

SEQ ID NO: 3804 - RNA, 19 nt, Artificial Sequence
  Description of Artificial Sequence: Synthetic oligonucleotide
uagagaaaauagauaaaac

SEQ ID NO: 3805 - RNA, 19 nt, Artificial Sequence
  Description of Artificial Sequence: Synthetic oligonucleotide
guagagaaaauagauaaaa

SEQ ID NO: 3806 - RNA, 19 nt, Artificial Sequence
  Description of Artificial Sequence: Synthetic oligonucleotide
cguagagaaaauagauaaa

SEQ ID NO: 3807 - RNA, 19 nt, Artificial Sequence
  Description of Artificial Sequence: Synthetic oligonucleotide
ccguagagaaaauagauaa

SEQ ID NO: 3808 - RNA, 19 nt, Artificial Sequence
  Description of Artificial Sequence: Synthetic oligonucleotide
gccguagagaaaauagaua

SEQ ID NO: 3809 - RNA, 19 nt, Artificial Sequence
  Description of Artificial Sequence: Synthetic oligonucleotide
agccguagagaaaauagau

SEQ ID NO: 3810 - RNA, 19 nt, Artificial Sequence
  Description of Artificial Sequence: Synthetic oligonucleotide
aagccguagagaaaauaga

SEQ ID NO: 3811 - RNA, 19 nt, Artificial Sequence
  Description of Artificial Sequence: Synthetic oligonucleotide
uaagccguagagaaaauag

SEQ ID NO: 3812 - RNA, 19 nt, Artificial Sequence
  Description of Artificial Sequence: Synthetic oligonucleotide
cuaagccguagagaaaaua

SEQ ID NO: 3813 - RNA, 19 nt, Artificial Sequence
  Description of Artificial Sequence: Synthetic oligonucleotide
ccuaagccguagagaaaau

SEQ ID NO: 3814 - RNA, 19 nt, Artificial Sequence
  Description of Artificial Sequence: Synthetic oligonucleotide
gccuaagccguagagaaaa

SEQ ID NO: 3815 - RNA, 19 nt, Artificial Sequence
  Description of Artificial Sequence: Synthetic oligonucleotide
agccuaagccguagagaaa

SEQ ID NO: 3816 - RNA, 19 nt, Artificial Sequence
  Description of Artificial Sequence: Synthetic oligonucleotide
uagccuaagccguagagaa

SEQ ID NO: 3817 - RNA, 19 nt, Artificial Sequence
  Description of Artificial Sequence: Synthetic oligonucleotide
auagccuaagccguagaga

SEQ ID NO: 3818 - RNA, 19 nt, Artificial Sequence
  Description of Artificial Sequence: Synthetic oligonucleotide
cauagccuaagccguagag

SEQ ID NO: 3819 - RNA, 19 nt, Artificial Sequence
  Description of Artificial Sequence: Synthetic oligonucleotide
acauagccuaagccguaga

SEQ ID NO: 3820 - RNA, 19 nt, Artificial Sequence
  Description of Artificial Sequence: Synthetic oligonucleotide
cacauagccuaagccguag

SEQ ID NO: 3821 - RNA, 19 nt, Artificial Sequence
  Description of Artificial Sequence: Synthetic oligonucleotide
ucacauagccuaagccgua

SEQ ID NO: 3822 - RNA, 19 nt, Artificial Sequence
  Description of Artificial Sequence: Synthetic oligonucleotide
cucacauagccuaagccgu

SEQ ID NO: 3823 - RNA, 19 nt, Artificial Sequence
  Description of Artificial Sequence: Synthetic oligonucleotide
ccucacauagccuaagccg

SEQ ID NO: 3824 - RNA, 19 nt, Artificial Sequence
  Description of Artificial Sequence: Synthetic oligonucleotide
cccucacauagccuaagcc

SEQ ID NO: 3825 - RNA, 19 nt, Artificial Sequence
  Description of Artificial Sequence: Synthetic oligonucleotide
gcccucacauagccuaagc

SEQ ID NO: 3826 - RNA, 19 nt, Artificial Sequence
  Description of Artificial Sequence: Synthetic oligonucleotide
ugcccucacauagccuaag

SEQ ID NO: 3827 - RNA, 19 nt, Artificial Sequence
  Description of Artificial Sequence: Synthetic oligonucleotide
uugcccucacauagccuaa

SEQ ID NO: 3828 - RNA, 19 nt, Artificial Sequence
  Description of Artificial Sequence: Synthetic oligonucleotide
uuugcccucacauagccua

SEQ ID NO: 3829 - RNA, 19 nt, Artificial Sequence
  Description of Artificial Sequence: Synthetic oligonucleotide
uuuugcccucacauagccu

SEQ ID NO: 3830 - RNA, 19 nt, Artificial Sequence
  Description of Artificial Sequence: Synthetic oligonucleotide
guuuugcccucacauagcc

SEQ ID NO: 3831 - RNA, 19 nt, Artificial Sequence
  Description of Artificial Sequence: Synthetic oligonucleotide
uguuuugcccucacauagc

SEQ ID NO: 3832 - RNA, 19 nt, Artificial Sequence
  Description of Artificial Sequence: Synthetic oligonucleotide
guguuuugcccucacauag

SEQ ID NO: 3833 - RNA, 19 nt, Artificial Sequence
  Description of Artificial Sequence: Synthetic oligonucleotide
uguguuuugcccucacaua

SEQ ID NO: 3834 - RNA, 19 nt, Artificial Sequence
  Description of Artificial Sequence: Synthetic oligonucleotide
uuguguuuugcccucacau

SEQ ID NO: 3835 - RNA, 19 nt, Artificial Sequence
  Description of Artificial Sequence: Synthetic oligonucleotide
uuuguguuuugcccucaca

SEQ ID NO: 3836 - RNA, 19 nt, Artificial Sequence
  Description of Artificial Sequence: Synthetic oligonucleotide
auuuguguuuugcccucac

SEQ ID NO: 3837 - RNA, 19 nt, Artificial Sequence
  Description of Artificial Sequence: Synthetic oligonucleotide
gauuuguguuuugcccuca

SEQ ID NO: 3838 - RNA, 19 nt, Artificial Sequence
  Description of Artificial Sequence: Synthetic oligonucleotide
ggauuuguguuuugcccuc

SEQ ID NO: 3839 - RNA, 19 nt, Artificial Sequence
  Description of Artificial Sequence: Synthetic oligonucleotide
gggauuuguguuuugcccu

SEQ ID NO: 3840 - RNA, 19 nt, Artificial Sequence
  Description of Artificial Sequence: Synthetic oligonucleotide
agggauuuguguuuugccc

SEQ ID NO: 3841 - RNA, 19 nt, Artificial Sequence
  Description of Artificial Sequence: Synthetic oligonucleotide
aagggauuuguguuuugcc

SEQ ID NO: 3842 - RNA, 19 nt, Artificial Sequence
  Description of Artificial Sequence: Synthetic oligonucleotide
aaagggauuuguguuuugc

SEQ ID NO: 3843 - RNA, 19 nt, Artificial Sequence
  Description of Artificial Sequence: Synthetic oligonucleotide
caaagggauuuguguuuug

SEQ ID NO: 3844 - RNA, 19 nt, Artificial Sequence
  Description of Artificial Sequence: Synthetic oligonucleotide
gcaaagggauuuguguuuu

SEQ ID NO: 3845 - RNA, 19 nt, Artificial Sequence
  Description of Artificial Sequence: Synthetic oligonucleotide
agcaaagggauuuguguuu

SEQ ID NO: 3846 - RNA, 19 nt, Artificial Sequence
  Description of Artificial Sequence: Synthetic oligonucleotide
uagcaaagggauuuguguu

SEQ ID NO: 3847 - RNA, 19 nt, Artificial Sequence
  Description of Artificial Sequence: Synthetic oligonucleotide
uuagcaaagggauuugugu

SEQ ID NO: 3848 - RNA, 19 nt, Artificial Sequence
  Description of Artificial Sequence: Synthetic oligonucleotide
uuuagcaaagggauuugug

SEQ ID NO: 3849 - RNA, 19 nt, Artificial Sequence
  Description of Artificial Sequence: Synthetic oligonucleotide
uuuuagcaaagggauuugu

SEQ ID NO: 3850 - RNA, 19 nt, Artificial Sequence
  Description of Artificial Sequence: Synthetic oligonucleotide
uuuuuagcaaagggauuug

SEQ ID NO: 3851 - RNA, 19 nt, Artificial Sequence
  Description of Artificial Sequence: Synthetic oligonucleotide
cuuuuuagcaaagggauuu

SEQ ID NO: 3852 - RNA, 19 nt, Artificial Sequence
  Description of Artificial Sequence: Synthetic oligonucleotide
ucuuuuuagcaaagggauu

SEQ ID NO: 3853 - RNA, 19 nt, Artificial Sequence
  Description of Artificial Sequence: Synthetic oligonucleotide
uucuuuuuagcaaagggau

SEQ ID NO: 3854 - RNA, 19 nt, Artificial Sequence
  Description of Artificial Sequence: Synthetic oligonucleotide
guucuuuuuagcaaaggga

SEQ ID NO: 3855 - RNA, 19 nt, Artificial Sequence
  Description of Artificial Sequence: Synthetic oligonucleotide
gguucuuuuuagcaaaggg

SEQ ID NO: 3856 - RNA, 19 nt, Artificial Sequence
  Description of Artificial Sequence: Synthetic oligonucleotide
ugguucuuuuuagcaaagg

SEQ ID NO: 3857 - RNA, 19 nt, Artificial Sequence
  Description of Artificial Sequence: Synthetic oligonucleotide
augguucuuuuuagcaaag

SEQ ID NO: 3858 - RNA, 19 nt, Artificial Sequence
  Description of Artificial Sequence: Synthetic oligonucleotide
uaugguucuuuuuagcaaa

SEQ ID NO: 3859 - RNA, 19 nt, Artificial Sequence
  Description of Artificial Sequence: Synthetic oligonucleotide
auaugguucuuuuuagcaa

SEQ ID NO: 3860 - RNA, 19 nt, Artificial Sequence
  Description of Artificial Sequence: Synthetic oligonucleotide
aauaugguucuuuuuagca

SEQ ID NO: 3861 - RNA, 19 nt, Artificial Sequence
  Description of Artificial Sequence: Synthetic oligonucleotide
uaauaugguucuuuuuagc

SEQ ID NO: 3862 - RNA, 19 nt, Artificial Sequence
  Description of Artificial Sequence: Synthetic oligonucleotide
auaauaugguucuuuuuag

SEQ ID NO: 3863 - RNA, 19 nt, Artificial Sequence
  Description of Artificial Sequence: Synthetic oligonucleotide
aauaauaugguucuuuuua

SEQ ID NO: 3864 - RNA, 19 nt, Artificial Sequence
  Description of Artificial Sequence: Synthetic oligonucleotide
aaauaauaugguucuuuuu

SEQ ID NO: 3865 - RNA, 19 nt, Artificial Sequence
  Description of Artificial Sequence: Synthetic oligonucleotide
aaaauaauaugguucuuuu

SEQ ID NO: 3866 - RNA, 19 nt, Artificial Sequence
  Description of Artificial Sequence: Synthetic oligonucleotide
caaaauaauaugguucuuu

SEQ ID NO: 3867 - RNA, 19 nt, Artificial Sequence
  Description of Artificial Sequence: Synthetic oligonucleotide
ucaaaauaauaugguucuu

SEQ ID NO: 3868 - RNA, 19 nt, Artificial Sequence
  Description of Artificial Sequence: Synthetic oligonucleotide
aucaaaauaauaugguucu

SEQ ID NO: 3869 - RNA, 19 nt, Artificial Sequence
  Description of Artificial Sequence: Synthetic oligonucleotide
aaucaaaauaauaugguuc

SEQ ID NO: 3870 - RNA, 19 nt, Artificial Sequence
  Description of Artificial Sequence: Synthetic oligonucleotide
gaaucaaaauaauaugguu

SEQ ID NO: 3871 - RNA, 19 nt, Artificial Sequence
  Description of Artificial Sequence: Synthetic oligonucleotide
agaaucaaaauaauauggu

SEQ ID NO: 3872 - RNA, 19 nt, Artificial Sequence
  Description of Artificial Sequence: Synthetic oligonucleotide
gagaaucaaaauaauaugg

SEQ ID NO: 3873 - RNA, 19 nt, Artificial Sequence
  Description of Artificial Sequence: Synthetic oligonucleotide
ugagaaucaaaauaauaug

SEQ ID NO: 3874 - RNA, 19 nt, Artificial Sequence
  Description of Artificial Sequence: Synthetic oligonucleotide
uugagaaucaaaauaauau

SEQ ID NO: 3875 - RNA, 19 nt, Artificial Sequence
  Description of Artificial Sequence: Synthetic oligonucleotide
uuugagaaucaaaauaaua

SEQ ID NO: 3876 - RNA, 19 nt, Artificial Sequence
  Description of Artificial Sequence: Synthetic oligonucleotide
cuuugagaaucaaaauaau

SEQ ID NO: 3877 - RNA, 19 nt, Artificial Sequence
  Description of Artificial Sequence: Synthetic oligonucleotide
ccuuugagaaucaaaauaa

SEQ ID NO: 3878 - RNA, 19 nt, Artificial Sequence
  Description of Artificial Sequence: Synthetic oligonucleotide
uccuuugagaaucaaaaua

SEQ ID NO: 3879 - RNA, 19 nt, Artificial Sequence
  Description of Artificial Sequence: Synthetic oligonucleotide
auccuuugagaaucaaaau

SEQ ID NO: 3880 - RNA, 19 nt, Artificial Sequence
  Description of Artificial Sequence: Synthetic oligonucleotide
uauccuuugagaaucaaaa

SEQ ID NO: 3881 - RNA, 19 nt, Artificial Sequence
  Description of Artificial Sequence: Synthetic oligonucleotide
cuauccuuugagaaucaaa

SEQ ID NO: 3882 - RNA, 19 nt, Artificial Sequence
  Description of Artificial Sequence: Synthetic oligonucleotide
ccuauccuuugagaaucaa

SEQ ID NO: 3883 - RNA, 19 nt, Artificial Sequence
  Description of Artificial Sequence: Synthetic oligonucleotide
gccuauccuuugagaauca

SEQ ID NO: 3884 - RNA, 19 nt, Artificial Sequence
  Description of Artificial Sequence: Synthetic oligonucleotide
ggccuauccuuugagaauc

SEQ ID NO: 3885 - RNA, 19 nt, Artificial Sequence
  Description of Artificial Sequence: Synthetic oligonucleotide
aggccuauccuuugagaau

SEQ ID NO: 3886 - RNA, 19 nt, Artificial Sequence
  Description of Artificial Sequence: Synthetic oligonucleotide
aaggccuauccuuugagaa

SEQ ID NO: 3887 - RNA, 19 nt, Artificial Sequence
  Description of Artificial Sequence: Synthetic oligonucleotide
aaaggccuauccuuugaga

SEQ ID NO: 3888 - RNA, 19 nt, Artificial Sequence
  Description of Artificial Sequence: Synthetic oligonucleotide
caaaggccuauccuuugag

SEQ ID NO: 3889 - RNA, 19 nt, Artificial Sequence
  Description of Artificial Sequence: Synthetic oligonucleotide
ucaaaggccuauccuuuga

SEQ ID NO: 3890 - RNA, 19 nt, Artificial Sequence
  Description of Artificial Sequence: Synthetic oligonucleotide
cucaaaggccuauccuuug

SEQ ID NO: 3891 - RNA, 19 nt, Artificial Sequence
  Description of Artificial Sequence: Synthetic oligonucleotide
acucaaaggccuauccuuu

SEQ ID NO: 3892 - RNA, 19 nt, Artificial Sequence
  Description of Artificial Sequence: Synthetic oligonucleotide
cacucaaaggccuauccuu

SEQ ID NO: 3893 - RNA, 19 nt, Artificial Sequence
  Description of Artificial Sequence: Synthetic oligonucleotide
acacucaaaggccuauccu

SEQ ID NO: 3894 - RNA, 19 nt, Artificial Sequence
  Description of Artificial Sequence: Synthetic oligonucleotide
aacacucaaaggccuaucc

SEQ ID NO: 3895 - RNA, 19 nt, Artificial Sequence
  Description of Artificial Sequence: Synthetic oligonucleotide
uaacacucaaaggccuauc

SEQ ID NO: 3896 - RNA, 19 nt, Artificial Sequence
  Description of Artificial Sequence: Synthetic oligonucleotide
cuaacacucaaaggccuau

SEQ ID NO: 3897 - RNA, 19 nt, Artificial Sequence
  Description of Artificial Sequence: Synthetic oligonucleotide
ucuaacacucaaaggccua

SEQ ID NO: 3898 - RNA, 19 nt, Artificial Sequence
  Description of Artificial Sequence: Synthetic oligonucleotide
cucuaacacucaaaggccu

SEQ ID NO: 3899 - RNA, 19 nt, Artificial Sequence
  Description of Artificial Sequence: Synthetic oligonucleotide
ucucuaacacucaaaggcc

SEQ ID NO: 3900 - RNA, 19 nt, Artificial Sequence
  Description of Artificial Sequence: Synthetic oligonucleotide
uucucuaacacucaaaggc

SEQ ID NO: 3901 - RNA, 19 nt, Artificial Sequence
  Description of Artificial Sequence: Synthetic oligonucleotide
uuucucuaacacucaaagg

SEQ ID NO: 3902 - RNA, 19 nt, Artificial Sequence
  Description of Artificial Sequence: Synthetic oligonucleotide
cuuucucuaacacucaaag

SEQ ID NO: 3903 - RNA, 19 nt, Artificial Sequence
  Description of Artificial Sequence: Synthetic oligonucleotide
ccuuucucuaacacucaaa

SEQ ID NO: 3904 - RNA, 19 nt, Artificial Sequence
  Description of Artificial Sequence: Synthetic oligonucleotide
uccuuucucuaacacucaa

SEQ ID NO: 3905 - RNA, 19 nt, Artificial Sequence
  Description of Artificial Sequence: Synthetic oligonucleotide
cuccuuucucuaacacuca

SEQ ID NO: 3906 - RNA, 19 nt, Artificial Sequence
  Description of Artificial Sequence: Synthetic oligonucleotide
acuccuuucucuaacacuc

SEQ ID NO: 3907 - RNA, 19 nt, Artificial Sequence
  Description of Artificial Sequence: Synthetic oligonucleotide
cacuccuuucucuaacacu

SEQ ID NO: 3908 - RNA, 19 nt, Artificial Sequence
  Description of Artificial Sequence: Synthetic oligonucleotide
ucacuccuuucucuaacac

SEQ ID NO: 3909 - RNA, 19 nt, Artificial Sequence
  Description of Artificial Sequence: Synthetic oligonucleotide
uucacuccuuucucuaaca

SEQ ID NO: 3910 - RNA, 19 nt, Artificial Sequence
  Description of Artificial Sequence: Synthetic oligonucleotide
cuucacuccuuucucuaac

SEQ ID NO: 3911 - RNA, 19 nt, Artificial Sequence
  Description of Artificial Sequence: Synthetic oligonucleotide
ccuucacuccuuucucuaa

SEQ ID NO: 3912 - RNA, 19 nt, Artificial Sequence
  Description of Artificial Sequence: Synthetic oligonucleotide
uccuucacuccuuucucua

SEQ ID NO: 3913 - RNA, 19 nt, Artificial Sequence
  Description of Artificial Sequence: Synthetic oligonucleotide
cuccuucacuccuuucucu

SEQ ID NO: 3914 - RNA, 19 nt, Artificial Sequence
  Description of Artificial Sequence: Synthetic oligonucleotide
ccuccuucacuccuuucuc

SEQ ID NO: 3915 - RNA, 19 nt, Artificial Sequence
  Description of Artificial Sequence: Synthetic oligonucleotide
gccuccuucacuccuuucu

SEQ ID NO: 3916 - RNA, 19 nt, Artificial Sequence
  Description of Artificial Sequence: Synthetic oligonucleotide
ugccuccuucacuccuuuc

SEQ ID NO: 3917 - RNA, 19 nt, Artificial Sequence
  Description of Artificial Sequence: Synthetic oligonucleotide
cugccuccuucacuccuuu

SEQ ID NO: 3918 - RNA, 19 nt, Artificial Sequence
  Description of Artificial Sequence: Synthetic oligonucleotide
ccugccuccuucacuccuu

SEQ ID NO: 3919 - RNA, 19 nt, Artificial Sequence
  Description of Artificial Sequence: Synthetic oligonucleotide
accugccuccuucacuccu

SEQ ID NO: 3920 - RNA, 19 nt, Artificial Sequence
  Description of Artificial Sequence: Synthetic oligonucleotide
caccugccuccuucacucc

SEQ ID NO: 3921 - RNA, 19 nt, Artificial Sequence
  Description of Artificial Sequence: Synthetic oligonucleotide
ccaccugccuccuucacuc

SEQ ID NO: 3922 - RNA, 19 nt, Artificial Sequence
  Description of Artificial Sequence: Synthetic oligonucleotide
cccaccugccuccuucacu

SEQ ID NO: 3923 - RNA, 19 nt, Artificial Sequence
  Description of Artificial Sequence: Synthetic oligonucleotide
ucccaccugccuccuucac

SEQ ID NO: 3924 - RNA, 19 nt, Artificial Sequence
  Description of Artificial Sequence: Synthetic oligonucleotide
uucccaccugccuccuuca

SEQ ID NO: 3925 - RNA, 19 nt, Artificial Sequence
  Description of Artificial Sequence: Synthetic oligonucleotide
uuucccaccugccuccuuc

SEQ ID NO: 3926 - RNA, 19 nt, Artificial Sequence
  Description of Artificial Sequence: Synthetic oligonucleotide
auuucccaccugccuccuu

SEQ ID NO: 3927 - RNA, 19 nt, Artificial Sequence
  Description of Artificial Sequence: Synthetic oligonucleotide
cauuucccaccugccuccu

SEQ ID NO: 3928 - RNA, 19 nt, Artificial Sequence
  Description of Artificial Sequence: Synthetic oligonucleotide
ccauuucccaccugccucc

SEQ ID NO: 3929 - RNA, 19 nt, Artificial Sequence
  Description of Artificial Sequence: Synthetic oligonucleotide
accauuucccaccugccuc

SEQ ID NO: 3930 - RNA, 19 nt, Artificial Sequence
  Description of Artificial Sequence: Synthetic oligonucleotide
uaccauuucccaccugccu

SEQ ID NO: 3931 - RNA, 19 nt, Artificial Sequence
  Description of Artificial Sequence: Synthetic oligonucleotide
auaccauuucccaccugcc

SEQ ID NO: 3932 - RNA, 19 nt, Artificial Sequence
  Description of Artificial Sequence: Synthetic oligonucleotide
aauaccauuucccaccugc

SEQ ID NO: 3933 - RNA, 19 nt, Artificial Sequence
  Description of Artificial Sequence: Synthetic oligonucleotide
aaauaccauuucccaccug

SEQ ID NO: 3934 - RNA, 19 nt, Artificial Sequence
  Description of Artificial Sequence: Synthetic oligonucleotide
gaaauaccauuucccaccu

SEQ ID NO: 3935 - RNA, 19 nt, Artificial Sequence
  Description of Artificial Sequence: Synthetic oligonucleotide
agaaauaccauuucccacc

SEQ ID NO: 3936 - RNA, 19 nt, Artificial Sequence
  Description of Artificial Sequence: Synthetic oligonucleotide
uagaaauaccauuucccac

SEQ ID NO: 3937 - RNA, 19 nt, Artificial Sequence
  Description of Artificial Sequence: Synthetic oligonucleotide
auagaaauaccauuuccca

SEQ ID NO: 3938 - RNA, 19 nt, Artificial Sequence
  Description of Artificial Sequence: Synthetic oligonucleotide
aauagaaauaccauuuccc

SEQ ID NO: 3939 - RNA, 19 nt, Artificial Sequence
  Description of Artificial Sequence: Synthetic oligonucleotide
aaauagaaauaccauuucc

SEQ ID NO: 3940 - RNA, 19 nt, Artificial Sequence
  Description of Artificial Sequence: Synthetic oligonucleotide
aaaauagaaauaccauuuc

SEQ ID NO: 3941 - RNA, 19 nt, Artificial Sequence
  Description of Artificial Sequence: Synthetic oligonucleotide
aaaaauagaaauaccauuu

SEQ ID NO: 3942 - RNA, 19 nt, Artificial Sequence
  Description of Artificial Sequence: Synthetic oligonucleotide
uaaaaauagaaauaccauu

SEQ ID NO: 3943 - RNA, 19 nt, Artificial Sequence
  Description of Artificial Sequence: Synthetic oligonucleotide
uuaaaaauagaaauaccau

SEQ ID NO: 3944 - RNA, 19 nt, Artificial Sequence
  Description of Artificial Sequence: Synthetic oligonucleotide
uuuaaaaauagaaauacca

SEQ ID NO: 3945 - RNA, 19 nt, Artificial Sequence
  Description of Artificial Sequence: Synthetic oligonucleotide
auuuaaaaauagaaauacc

SEQ ID NO: 3946 - RNA, 19 nt, Artificial Sequence
  Description of Artificial Sequence: Synthetic oligonucleotide
gauuuaaaaauagaaauac

SEQ ID NO: 3947 - RNA, 19 nt, Artificial Sequence
  Description of Artificial Sequence: Synthetic oligonucleotide
ggauuuaaaaauagaaaua

SEQ ID NO: 3948 - RNA, 19 nt, Artificial Sequence
  Description of Artificial Sequence: Synthetic oligonucleotide
uggauuuaaaaauagaaau

SEQ ID NO: 3949 - RNA, 19 nt, Artificial Sequence
  Description of Artificial Sequence: Synthetic oligonucleotide
cuggauuuaaaaauagaaa

SEQ ID NO: 3950 - RNA, 19 nt, Artificial Sequence
  Description of Artificial Sequence: Synthetic oligonucleotide
acuggauuuaaaaauagaa

SEQ ID NO: 3951 - RNA, 19 nt, Artificial Sequence
  Description of Artificial Sequence: Synthetic oligonucleotide
cacuggauuuaaaaauaga

SEQ ID NO: 3952 - RNA, 19 nt, Artificial Sequence
  Description of Artificial Sequence: Synthetic oligonucleotide
ucacuggauuuaaaaauag

SEQ ID NO: 3953 - RNA, 19 nt, Artificial Sequence
  Description of Artificial Sequence: Synthetic oligonucleotide
uucacuggauuuaaaaaua

SEQ ID NO: 3954 - RNA, 19 nt, Artificial Sequence
  Description of Artificial Sequence: Synthetic oligonucleotide
uuucacuggauuuaaaaau

SEQ ID NO: 3955 - RNA, 19 nt, Artificial Sequence
  Description of Artificial Sequence: Synthetic oligonucleotide
auuucacuggauuuaaaaa

SEQ ID NO: 3956 - RNA, 19 nt, Artificial Sequence
  Description of Artificial Sequence: Synthetic oligonucleotide
aauuucacuggauuuaaaa

SEQ ID NO: 3957 - RNA, 19 nt, Artificial Sequence
  Description of Artificial Sequence: Synthetic oligonucleotide
uaauuucacuggauuuaaa

SEQ ID NO: 3958 - RNA, 19 nt, Artificial Sequence
  Description of Artificial Sequence: Synthetic oligonucleotide
auaauuucacuggauuuaa

SEQ ID NO: 3959 - RNA, 19 nt, Artificial Sequence
  Description of Artificial Sequence: Synthetic oligonucleotide
gauaauuucacuggauuua

SEQ ID NO: 3960 - RNA, 19 nt, Artificial Sequence
  Description of Artificial Sequence: Synthetic oligonucleotide
agauaauuucacuggauuu

SEQ ID NO: 3961 - RNA, 19 nt, Artificial Sequence
  Description of Artificial Sequence: Synthetic oligonucleotide
aagauaauuucacuggauu

SEQ ID NO: 3962 - RNA, 19 nt, Artificial Sequence
  Description of Artificial Sequence: Synthetic oligonucleotide
caagauaauuucacuggau

SEQ ID NO: 3963 - RNA, 19 nt, Artificial Sequence
  Description of Artificial Sequence: Synthetic oligonucleotide
ucaagauaauuucacugga

SEQ ID NO: 3964 - RNA, 19 nt, Artificial Sequence
  Description of Artificial Sequence: Synthetic oligonucleotide
cucaagauaauuucacugg

SEQ ID NO: 3965 - RNA, 19 nt, Artificial Sequence
  Description of Artificial Sequence: Synthetic oligonucleotide
acucaagauaauuucacug

SEQ ID NO: 3966 - RNA, 19 nt, Artificial Sequence
  Description of Artificial Sequence: Synthetic oligonucleotide
gacucaagauaauuucacu

SEQ ID NO: 3967 - RNA, 19 nt, Artificial Sequence
  Description of Artificial Sequence: Synthetic oligonucleotide
agacucaagauaauuucac

SEQ ID NO: 3968 - RNA, 19 nt, Artificial Sequence
  Description of Artificial Sequence: Synthetic oligonucleotide
uagacucaagauaauuuca

SEQ ID NO: 3969 - RNA, 19 nt, Artificial Sequence
  Description of Artificial Sequence: Synthetic oligonucleotide
guagacucaagauaauuuc

SEQ ID NO: 3970 - RNA, 19 nt, Artificial Sequence
  Description of Artificial Sequence: Synthetic oligonucleotide
uguagacucaagauaauuu

SEQ ID NO: 3971 - RNA, 19 nt, Artificial Sequence
  Description of Artificial Sequence: Synthetic oligonucleotide
guguagacucaagauaauu

SEQ ID NO: 3972 - RNA, 19 nt, Artificial Sequence
  Description of Artificial Sequence: Synthetic oligonucleotide
uguguagacucaagauaau

SEQ ID NO: 3973 - RNA, 19 nt, Artificial Sequence
  Description of Artificial Sequence: Synthetic oligonucleotide
auguguagacucaagauaa

SEQ ID NO: 3974 - RNA, 19 nt, Artificial Sequence
  Description of Artificial Sequence: Synthetic oligonucleotide
aauguguagacucaagaua

SEQ ID NO: 3975 - RNA, 19 nt, Artificial Sequence
  Description of Artificial Sequence: Synthetic oligonucleotide
uaauguguagacucaagau

SEQ ID NO: 3976 - RNA, 19 nt, Artificial Sequence
  Description of Artificial Sequence: Synthetic oligonucleotide
auaauguguagacucaaga

SEQ ID NO: 3977 - RNA, 19 nt, Artificial Sequence
  Description of Artificial Sequence: Synthetic oligonucleotide
aauaauguguagacucaag

SEQ ID NO: 3978 - RNA, 19 nt, Artificial Sequence
  Description of Artificial Sequence: Synthetic oligonucleotide
aaauaauguguagacucaa

SEQ ID NO: 3979 - RNA, 19 nt, Artificial Sequence
  Description of Artificial Sequence: Synthetic oligonucleotide
aaaauaauguguagacuca

SEQ ID NO: 3980 - RNA, 19 nt, Artificial Sequence
  Description of Artificial Sequence: Synthetic oligonucleotide
aaaaauaauguguagacuc

SEQ ID NO: 3981 - RNA, 19 nt, Artificial Sequence
  Description of Artificial Sequence: Synthetic oligonucleotide
uaaaaauaauguguagacu

SEQ ID NO: 3982 - RNA, 19 nt, Artificial Sequence
  Description of Artificial Sequence: Synthetic oligonucleotide
uuaaaaauaauguguagac

SEQ ID NO: 3983 - RNA, 19 nt, Artificial Sequence
  Description of Artificial Sequence: Synthetic oligonucleotide
uuuaaaaauaauguguaga

SEQ ID NO: 3984 - RNA, 19 nt, Artificial Sequence
  Description of Artificial Sequence: Synthetic oligonucleotide
uuuuaaaaauaauguguag

SEQ ID NO: 3985 - RNA, 19 nt, Artificial Sequence
  Description of Artificial Sequence: Synthetic oligonucleotide
guuuuaaaaauaaugugua

SEQ ID NO: 3986 - RNA, 19 nt, Artificial Sequence
  Description of Artificial Sequence: Synthetic oligonucleotide
uguuuuaaaaauaaugugu

SEQ ID NO: 3987 - RNA, 19 nt, Artificial Sequence
  Description of Artificial Sequence: Synthetic oligonucleotide
guguuuuaaaaauaaugug

SEQ ID NO: 3988 - RNA, 19 nt, Artificial Sequence
  Description of Artificial Sequence: Synthetic oligonucleotide
uguguuuuaaaaauaaugu

SEQ ID NO: 3989 - RNA, 19 nt, Artificial Sequence
  Description of Artificial Sequence: Synthetic oligonucleotide
uuguguuuuaaaaauaaug

SEQ ID NO: 3990 - RNA, 19 nt, Artificial Sequence
  Description of Artificial Sequence: Synthetic oligonucleotide
uuuguguuuuaaaaauaau

SEQ ID NO: 3991 - RNA, 19 nt, Artificial Sequence
  Description of Artificial Sequence: Synthetic oligonucleotide
uuuuguguuuuaaaaauaa

SEQ ID NO: 3992 - RNA, 19 nt, Artificial Sequence
  Description of Artificial Sequence: Synthetic oligonucleotide
uuuuuguguuuuaaaaaua

SEQ ID NO: 3993 - RNA, 19 nt, Artificial Sequence
  Description of Artificial Sequence: Synthetic oligonucleotide
auuuuuguguuuuaaaaau

SEQ ID NO: 3994 - RNA, 19 nt, Artificial Sequence
  Description of Artificial Sequence: Synthetic oligonucleotide
aauuuuuguguuuuaaaaa

SEQ ID NO: 3995 - RNA, 19 nt, Artificial Sequence
  Description of Artificial Sequence: Synthetic oligonucleotide
caauuuuuguguuuuaaaa

SEQ ID NO: 3996 - RNA, 19 nt, Artificial Sequence
  Description of Artificial Sequence: Synthetic oligonucleotide
acaauuuuuguguuuuaaa

SEQ ID NO: 3997 - RNA, 19 nt, Artificial Sequence
  Description of Artificial Sequence: Synthetic oligonucleotide
aacaauuuuuguguuuuaa

SEQ ID NO: 3998 - RNA, 19 nt, Artificial Sequence
  Description of Artificial Sequence: Synthetic oligonucleotide
gaacaauuuuuguguuuua

SEQ ID NO: 3999 - RNA, 19 nt, Artificial Sequence
  Description of Artificial Sequence: Synthetic oligonucleotide
cgaacaauuuuuguguuuu

SEQ ID NO: 4000 - RNA, 19 nt, Artificial Sequence
  Description of Artificial Sequence: Synthetic oligonucleotide
ccgaacaauuuuuguguuu

SEQ ID NO: 4001 - RNA, 19 nt, Artificial Sequence
  Description of Artificial Sequence: Synthetic oligonucleotide
gccgaacaauuuuuguguu

SEQ ID NO: 4002 - RNA, 19 nt, Artificial Sequence
  Description of Artificial Sequence: Synthetic oligonucleotide
agccgaacaauuuuugugu

SEQ ID NO: 4003 - RNA, 19 nt, Artificial Sequence
  Description of Artificial Sequence: Synthetic oligonucleotide
cagccgaacaauuuuugug

SEQ ID NO: 4004 - RNA, 19 nt, Artificial Sequence
  Description of Artificial Sequence: Synthetic oligonucleotide
ccagccgaacaauuuuugu

SEQ ID NO: 4005 - RNA, 19 nt, Artificial Sequence
  Description of Artificial Sequence: Synthetic oligonucleotide
uccagccgaacaauuuuug

SEQ ID NO: 4006 - RNA, 19 nt, Artificial Sequence
  Description of Artificial Sequence: Synthetic oligonucleotide
uuccagccgaacaauuuuu

SEQ ID NO: 4007 - RNA, 19 nt, Artificial Sequence
  Description of Artificial Sequence: Synthetic oligonucleotide
guuccagccgaacaauuuu

SEQ ID NO: 4008 - RNA, 19 nt, Artificial Sequence
  Description of Artificial Sequence: Synthetic oligonucleotide
aguuccagccgaacaauuu

SEQ ID NO: 4009 - RNA, 19 nt, Artificial Sequence
  Description of Artificial Sequence: Synthetic oligonucleotide
caguuccagccgaacaauu

SEQ ID NO: 4010 - RNA, 19 nt, Artificial Sequence
  Description of Artificial Sequence: Synthetic oligonucleotide
ucaguuccagccgaacaau

SEQ ID NO: 4011 - RNA, 19 nt, Artificial Sequence
  Description of Artificial Sequence: Synthetic oligonucleotide
gucaguuccagccgaacaa

SEQ ID NO: 4012 - RNA, 19 nt, Artificial Sequence
  Description of Artificial Sequence: Synthetic oligonucleotide
ggucaguuccagccgaaca

SEQ ID NO: 4013 - RNA, 19 nt, Artificial Sequence
  Description of Artificial Sequence: Synthetic oligonucleotide
gggucaguuccagccgaac

SEQ ID NO: 4014 - RNA, 19 nt, Artificial Sequence
  Description of Artificial Sequence: Synthetic oligonucleotide
ugggucaguuccagccgaa

SEQ ID NO: 4015 - RNA, 19 nt, Artificial Sequence
  Description of Artificial Sequence: Synthetic oligonucleotide
cugggucaguuccagccga

SEQ ID NO: 4016 - RNA, 19 nt, Artificial Sequence
  Description of Artificial Sequence: Synthetic oligonucleotide
ccugggucaguuccagccg

SEQ ID NO: 4017 - RNA, 19 nt, Artificial Sequence
  Description of Artificial Sequence: Synthetic oligonucleotide
gccugggucaguuccagcc

SEQ ID NO: 4018 - RNA, 19 nt, Artificial Sequence
  Description of Artificial Sequence: Synthetic oligonucleotide
agccugggucaguuccagc

SEQ ID NO: 4019 - RNA, 19 nt, Artificial Sequence
  Description of Artificial Sequence: Synthetic oligonucleotide
cagccugggucaguuccag

SEQ ID NO: 4020 - RNA, 19 nt, Artificial Sequence
  Description of Artificial Sequence: Synthetic oligonucleotide
ccagccugggucaguucca

SEQ ID NO: 4021 - RNA, 19 nt, Artificial Sequence
  Description of Artificial Sequence: Synthetic oligonucleotide
uccagccugggucaguucc

SEQ ID NO: 4022 - RNA, 19 nt, Artificial Sequence
  Description of Artificial Sequence: Synthetic oligonucleotide
guccagccugggucaguuc

SEQ ID NO: 4023 - RNA, 19 nt, Artificial Sequence
  Description of Artificial Sequence: Synthetic oligonucleotide
aguccagccugggucaguu

SEQ ID NO: 4024 - RNA, 19 nt, Artificial Sequence
  Description of Artificial Sequence: Synthetic oligonucleotide
aaguccagccugggucagu

SEQ ID NO: 4025 - RNA, 19 nt, Artificial Sequence
  Description of Artificial Sequence: Synthetic oligonucleotide
caaguccagccugggucag

SEQ ID NO: 4026 - RNA, 19 nt, Artificial Sequence
  Description of Artificial Sequence: Synthetic oligonucleotide
gcaaguccagccuggguca

SEQ ID NO: 4027 - RNA, 19 nt, Artificial Sequence
  Description of Artificial Sequence: Synthetic oligonucleotide
cgcaaguccagccuggguc

SEQ ID NO: 4028 - RNA, 19 nt, Artificial Sequence
  Description of Artificial Sequence: Synthetic oligonucleotide
ccgcaaguccagccugggu

SEQ ID NO: 4029 - RNA, 19 nt, Artificial Sequence
  Description of Artificial Sequence: Synthetic oligonucleotide
cccgcaaguccagccuggg

SEQ ID NO: 4030 - RNA, 19 nt, Artificial Sequence
  Description of Artificial Sequence: Synthetic oligonucleotide
ccccgcaaguccagccugg

SEQ ID NO: 4031 - RNA, 19 nt, Artificial Sequence
  Description of Artificial Sequence: Synthetic oligonucleotide
uccccgcaaguccagccug

SEQ ID NO: 4032 - RNA, 19 nt, Artificial Sequence
  Description of Artificial Sequence: Synthetic oligonucleotide
cuccccgcaaguccagccu

SEQ ID NO: 4033 - RNA, 19 nt, Artificial Sequence
  Description of Artificial Sequence: Synthetic oligonucleotide
ccuccccgcaaguccagcc

SEQ ID NO: 4034 - RNA, 19 nt, Artificial Sequence
  Description of Artificial Sequence: Synthetic oligonucleotide
uccuccccgcaaguccagc

SEQ ID NO: 4035 - RNA, 19 nt, Artificial Sequence
  Description of Artificial Sequence: Synthetic oligonucleotide
uuccuccccgcaaguccag

SEQ ID NO: 4036 - RNA, 19 nt, Artificial Sequence
  Description of Artificial Sequence: Synthetic oligonucleotide
uuuccuccccgcaagucca

SEQ ID NO: 4037 - RNA, 19 nt, Artificial Sequence
  Description of Artificial Sequence: Synthetic oligonucleotide
guuuccuccccgcaagucc

SEQ ID NO: 4038 - RNA, 19 nt, Artificial Sequence
  Description of Artificial Sequence: Synthetic oligonucleotide
aguuuccuccccgcaaguc

SEQ ID NO: 4039 - RNA, 19 nt, Artificial Sequence
  Description of Artificial Sequence: Synthetic oligonucleotide
gaguuuccuccccgcaagu

SEQ ID NO: 4040 - RNA, 19 nt, Artificial Sequence
  Description of Artificial Sequence: Synthetic oligonucleotide
ggaguuuccuccccgcaag

SEQ ID NO: 4041 - RNA, 19 nt, Artificial Sequence
  Description of Artificial Sequence: Synthetic oligonucleotide
uggaguuuccuccccgcaa

SEQ ID NO: 4042 - RNA, 19 nt, Artificial Sequence
  Description of Artificial Sequence: Synthetic oligonucleotide
cuggaguuuccuccccgca

SEQ ID NO: 4043 - RNA, 19 nt, Artificial Sequence
  Description of Artificial Sequence: Synthetic oligonucleotide
ccuggaguuuccuccccgc

SEQ ID NO: 4044 - RNA, 19 nt, Artificial Sequence
  Description of Artificial Sequence: Synthetic oligonucleotide
cccuggaguuuccuccccg

SEQ ID NO: 4045 - RNA, 19 nt, Artificial Sequence
  Description of Artificial Sequence: Synthetic oligonucleotide
gcccuggaguuuccucccc

SEQ ID NO: 4046 - RNA, 19 nt, Artificial Sequence
  Description of Artificial Sequence: Synthetic oligonucleotide
ugcccuggaguuuccuccc

SEQ ID NO: 4047 - RNA, 19 nt, Artificial Sequence
  Description of Artificial Sequence: Synthetic oligonucleotide
gugcccuggaguuuccucc

SEQ ID NO: 4048 - RNA, 19 nt, Artificial Sequence
  Description of Artificial Sequence: Synthetic oligonucleotide
agugcccuggaguuuccuc

SEQ ID NO: 4049 - RNA, 19 nt, Artificial Sequence
  Description of Artificial Sequence: Synthetic oligonucleotide
cagugcccuggaguuuccu

SEQ ID NO: 4050 - RNA, 19 nt, Artificial Sequence
  Description of Artificial Sequence: Synthetic oligonucleotide
gcagugcccuggaguuucc

SEQ ID NO: 4051 - RNA, 19 nt, Artificial Sequence
  Description of Artificial Sequence: Synthetic oligonucleotide
ugcagugcccuggaguuuc

SEQ ID NO: 4052 - RNA, 19 nt, Artificial Sequence
  Description of Artificial Sequence: Synthetic oligonucleotide
augcagugcccuggaguuu

SEQ ID NO: 4053 - RNA, 19 nt, Artificial Sequence
  Description of Artificial Sequence: Synthetic oligonucleotide
gaugcagugcccuggaguu

SEQ ID NO: 4054 - RNA, 19 nt, Artificial Sequence
  Description of Artificial Sequence: Synthetic oligonucleotide
agaugcagugcccuggagu

SEQ ID NO: 4055 - RNA, 19 nt, Artificial Sequence
  Description of Artificial Sequence: Synthetic oligonucleotide
cagaugcagugcccuggag

SEQ ID NO: 4056 - RNA, 19 nt, Artificial Sequence
  Description of Artificial Sequence: Synthetic oligonucleotide
ccagaugcagugcccugga

SEQ ID NO: 4057 - RNA, 19 nt, Artificial Sequence
  Description of Artificial Sequence: Synthetic oligonucleotide
gccagaugcagugcccugg

SEQ ID NO: 4058 - RNA, 19 nt, Artificial Sequence
  Description of Artificial Sequence: Synthetic oligonucleotide
cgccagaugcagugcccug

SEQ ID NO: 4059 - RNA, 19 nt, Artificial Sequence
  Description of Artificial Sequence: Synthetic oligonucleotide
ucgccagaugcagugcccu

SEQ ID NO: 4060 - RNA, 19 nt, Artificial Sequence
  Description of Artificial Sequence: Synthetic oligonucleotide
aucgccagaugcagugccc

SEQ ID NO: 4061 - RNA, 19 nt, Artificial Sequence
  Description of Artificial Sequence: Synthetic oligonucleotide
gaucgccagaugcagugcc

SEQ ID NO: 4062 - RNA, 19 nt, Artificial Sequence
  Description of Artificial Sequence: Synthetic oligonucleotide
ugaucgccagaugcagugc

SEQ ID NO: 4063 - RNA, 19 nt, Artificial Sequence
  Description of Artificial Sequence: Synthetic oligonucleotide
cugaucgccagaugcagug

SEQ ID NO: 4064 - RNA, 19 nt, Artificial Sequence
  Description of Artificial Sequence: Synthetic oligonucleotide
ucugaucgccagaugcagu

SEQ ID NO: 4065 - RNA, 19 nt, Artificial Sequence
  Description of Artificial Sequence: Synthetic oligonucleotide
gucugaucgccagaugcag

SEQ ID NO: 4066 - RNA, 19 nt, Artificial Sequence
  Description of Artificial Sequence: Synthetic oligonucleotide
agucugaucgccagaugca

SEQ ID NO: 4067 - RNA, 19 nt, Artificial Sequence
  Description of Artificial Sequence: Synthetic oligonucleotide
gagucugaucgccagaugc

SEQ ID NO: 4068 - RNA, 19 nt, Artificial Sequence
  Description of Artificial Sequence: Synthetic oligonucleotide
agagucugaucgccagaug

SEQ ID NO: 4069 - RNA, 19 nt, Artificial Sequence
  Description of Artificial Sequence: Synthetic oligonucleotide
cagagucugaucgccagau

SEQ ID NO: 4070 - RNA, 19 nt, Artificial Sequence
  Description of Artificial Sequence: Synthetic oligonucleotide
ucagagucugaucgccaga

SEQ ID NO: 4071 - RNA, 19 nt, Artificial Sequence
  Description of Artificial Sequence: Synthetic oligonucleotide
cucagagucugaucgccag

SEQ ID NO: 4072 - RNA, 19 nt, Artificial Sequence
  Description of Artificial Sequence: Synthetic oligonucleotide
gcucagagucugaucgcca

SEQ ID NO: 4073 - RNA, 19 nt, Artificial Sequence
  Description of Artificial Sequence: Synthetic oligonucleotide
ugcucagagucugaucgcc

SEQ ID NO: 4074 - RNA, 19 nt, Artificial Sequence
  Description of Artificial Sequence: Synthetic oligonucleotide
gugcucagagucugaucgc

SEQ ID NO: 4075 - RNA, 19 nt, Artificial Sequence
  Description of Artificial Sequence: Synthetic oligonucleotide
agugcucagagucugaucg

SEQ ID NO: 4076 - RNA, 19 nt, Artificial Sequence
  Description of Artificial Sequence: Synthetic oligonucleotide
cagugcucagagucugauc

SEQ ID NO: 4077 - RNA, 19 nt, Artificial Sequence
  Description of Artificial Sequence: Synthetic oligonucleotide
gcagugcucagagucugau

SEQ ID NO: 4078 - RNA, 19 nt, Artificial Sequence
  Description of Artificial Sequence: Synthetic oligonucleotide
ggcagugcucagagucuga

SEQ ID NO: 4079 - RNA, 19 nt, Artificial Sequence
  Description of Artificial Sequence: Synthetic oligonucleotide
gggcagugcucagagucug

SEQ ID NO: 4080 - RNA, 19 nt, Artificial Sequence
  Description of Artificial Sequence: Synthetic oligonucleotide
ggggcagugcucagagucu

SEQ ID NO: 4081 - RNA, 19 nt, Artificial Sequence
  Description of Artificial Sequence: Synthetic oligonucleotide
aggggcagugcucagaguc

SEQ ID NO: 4082 - RNA, 19 nt, Artificial Sequence
  Description of Artificial Sequence: Synthetic oligonucleotide
caggggcagugcucagagu

SEQ ID NO: 4083 - RNA, 19 nt, Artificial Sequence
  Description of Artificial Sequence: Synthetic oligonucleotide
gcaggggcagugcucagag

SEQ ID NO: 4084 - RNA, 19 nt, Artificial Sequence
  Description of Artificial Sequence: Synthetic oligonucleotide
agcaggggcagugcucaga

SEQ ID NO: 4085 - RNA, 19 nt, Artificial Sequence
  Description of Artificial Sequence: Synthetic oligonucleotide
gagcaggggcagugcucag

SEQ ID NO: 4086 - RNA, 19 nt, Artificial Sequence
  Description of Artificial Sequence: Synthetic oligonucleotide
cgagcaggggcagugcuca

SEQ ID NO: 4087 - RNA, 19 nt, Artificial Sequence
  Description of Artificial Sequence: Synthetic oligonucleotide
gcgagcaggggcagugcuc

SEQ ID NO: 4088 - RNA, 19 nt, Artificial Sequence
  Description of Artificial Sequence: Synthetic oligonucleotide
ggcgagcaggggcagugcu

SEQ ID NO: 4089 - RNA, 19 nt, Artificial Sequence
  Description of Artificial Sequence: Synthetic oligonucleotide
aggcgagcaggggcagugc

SEQ ID NO: 4090 - RNA, 19 nt, Artificial Sequence
  Description of Artificial Sequence: Synthetic oligonucleotide
aaggcgagcaggggcagug

SEQ ID NO: 4091 - RNA, 19 nt, Artificial Sequence
  Description of Artificial Sequence: Synthetic oligonucleotide
caaggcgagcaggggcagu

SEQ ID NO: 4092 - RNA, 19 nt, Artificial Sequence
  Description of Artificial Sequence: Synthetic oligonucleotide
ccaaggcgagcaggggcag

SEQ ID NO: 4093 - RNA, 19 nt, Artificial Sequence
  Description of Artificial Sequence: Synthetic oligonucleotide
accaaggcgagcaggggca

SEQ ID NO: 4094 - RNA, 19 nt, Artificial Sequence
  Description of Artificial Sequence: Synthetic oligonucleotide
gaccaaggcgagcaggggc

SEQ ID NO: 4095 - RNA, 19 nt, Artificial Sequence
  Description of Artificial Sequence: Synthetic oligonucleotide
ugaccaaggcgagcagggg

SEQ ID NO: 4096 - RNA, 19 nt, Artificial Sequence
  Description of Artificial Sequence: Synthetic oligonucleotide
augaccaaggcgagcaggg

SEQ ID NO: 4097 - RNA, 19 nt, Artificial Sequence
  Description of Artificial Sequence: Synthetic oligonucleotide
caugaccaaggcgagcagg

SEQ ID NO: 4098 - RNA, 19 nt, Artificial Sequence
  Description of Artificial Sequence: Synthetic oligonucleotide
acaugaccaaggcgagcag

SEQ ID NO: 4099 - RNA, 19 nt, Artificial Sequence
  Description of Artificial Sequence: Synthetic oligonucleotide
uacaugaccaaggcgagca

SEQ ID NO: 4100 - RNA, 19 nt, Artificial Sequence
  Description of Artificial Sequence: Synthetic oligonucleotide
guacaugaccaaggcgagc

SEQ ID NO: 4101 - RNA, 19 nt, Artificial Sequence
  Description of Artificial Sequence: Synthetic oligonucleotide
uguacaugaccaaggcgag

SEQ ID NO: 4102 - RNA, 19 nt, Artificial Sequence
  Description of Artificial Sequence: Synthetic oligonucleotide
cuguacaugaccaaggcga

SEQ ID NO: 4103 - RNA, 19 nt, Artificial Sequence
  Description of Artificial Sequence: Synthetic oligonucleotide
gcuguacaugaccaaggcg

SEQ ID NO: 4104 - RNA, 19 nt, Artificial Sequence
  Description of Artificial Sequence: Synthetic oligonucleotide
ugcuguacaugaccaaggc

SEQ ID NO: 4105 - RNA, 19 nt, Artificial Sequence
  Description of Artificial Sequence: Synthetic oligonucleotide
gugcuguacaugaccaagg

SEQ ID NO: 4106 - RNA, 19 nt, Artificial Sequence
  Description of Artificial Sequence: Synthetic oligonucleotide
agugcuguacaugaccaag

SEQ ID NO: 4107 - RNA, 19 nt, Artificial Sequence
  Description of Artificial Sequence: Synthetic oligonucleotide
cagugcuguacaugaccaa

SEQ ID NO: 4108 - RNA, 19 nt, Artificial Sequence
  Description of Artificial Sequence: Synthetic oligonucleotide
ucagugcuguacaugacca

SEQ ID NO: 4109 - RNA, 19 nt, Artificial Sequence
  Description of Artificial Sequence: Synthetic oligonucleotide
uucagugcuguacaugacc

SEQ ID NO: 4110 - RNA, 19 nt, Artificial Sequence
  Description of Artificial Sequence: Synthetic oligonucleotide
uuucagugcuguacaugac

SEQ ID NO: 4111 - RNA, 19 nt, Artificial Sequence
  Description of Artificial Sequence: Synthetic oligonucleotide
cuuucagugcuguacauga

SEQ ID NO: 4112 - RNA, 19 nt, Artificial Sequence
  Description of Artificial Sequence: Synthetic oligonucleotide
ccuuucagugcuguacaug

SEQ ID NO: 4113 - RNA, 19 nt, Artificial Sequence
  Description of Artificial Sequence: Synthetic oligonucleotide
uccuuucagugcuguacau

SEQ ID NO: 4114 - RNA, 19 nt, Artificial Sequence
  Description of Artificial Sequence: Synthetic oligonucleotide
uuccuuucagugcuguaca

SEQ ID NO: 4115 - RNA, 19 nt, Artificial Sequence
  Description of Artificial Sequence: Synthetic oligonucleotide
auuccuuucagugcuguac

SEQ ID NO: 4116 - RNA, 19 nt, Artificial Sequence
  Description of Artificial Sequence: Synthetic oligonucleotide
cauuccuuucagugcugua

SEQ ID NO: 4117 - RNA, 19 nt, Artificial Sequence
  Description of Artificial Sequence: Synthetic oligonucleotide
ucauuccuuucagugcugu

SEQ ID NO: 4118 - RNA, 19 nt, Artificial Sequence
  Description of Artificial Sequence: Synthetic oligonucleotide
uucauuccuuucagugcug

SEQ ID NO: 4119 - RNA, 19 nt, Artificial Sequence
  Description of Artificial Sequence: Synthetic oligonucleotide
cuucauuccuuucagugcu

SEQ ID NO: 4120 - RNA, 19 nt, Artificial Sequence
  Description of Artificial Sequence: Synthetic oligonucleotide
gcuucauuccuuucagugc

SEQ ID NO: 4121 - RNA, 19 nt, Artificial Sequence
  Description of Artificial Sequence: Synthetic oligonucleotide
ugcuucauuccuuucagug

SEQ ID NO: 4122 - RNA, 19 nt, Artificial Sequence
  Description of Artificial Sequence: Synthetic oligonucleotide
gugcuucauuccuuucagu

SEQ ID NO: 4123 - RNA, 19 nt, Artificial Sequence
  Description of Artificial Sequence: Synthetic oligonucleotide
ggugcuucauuccuuucag

SEQ ID NO: 4124 - RNA, 19 nt, Artificial Sequence
  Description of Artificial Sequence: Synthetic oligonucleotide
uggugcuucauuccuuuca

SEQ ID NO: 4125 - RNA, 19 nt, Artificial Sequence
  Description of Artificial Sequence: Synthetic oligonucleotide
cuggugcuucauuccuuuc

SEQ ID NO: 4126 - RNA, 19 nt, Artificial Sequence
  Description of Artificial Sequence: Synthetic oligonucleotide
gcuggugcuucauuccuuu

SEQ ID NO: 4127 - RNA, 19 nt, Artificial Sequence
  Description of Artificial Sequence: Synthetic oligonucleotide
ugcuggugcuucauuccuu

SEQ ID NO: 4128 - RNA, 19 nt, Artificial Sequence
  Description of Artificial Sequence: Synthetic oligonucleotide
cugcuggugcuucauuccu

SEQ ID NO: 4129 - RNA, 19 nt, Artificial Sequence
  Description of Artificial Sequence: Synthetic oligonucleotide
ccugcuggugcuucauucc

SEQ ID NO: 4130 - RNA, 19 nt, Artificial Sequence
  Description of Artificial Sequence: Synthetic oligonucleotide
uccugcuggugcuucauuc

SEQ ID NO: 4131 - RNA, 19 nt, Artificial Sequence
  Description of Artificial Sequence: Synthetic oligonucleotide
cuccugcuggugcuucauu

SEQ ID NO: 4132 - RNA, 19 nt, Artificial Sequence
  Description of Artificial Sequence: Synthetic oligonucleotide
ccuccugcuggugcuucau

SEQ ID NO: 4133 - RNA, 19 nt, Artificial Sequence
  Description of Artificial Sequence: Synthetic oligonucleotide
accuccugcuggugcuuca

SEQ ID NO: 4134 - RNA, 19 nt, Artificial Sequence
  Description of Artificial Sequence: Synthetic oligonucleotide
caccuccugcuggugcuuc

SEQ ID NO: 4135 - RNA, 19 nt, Artificial Sequence
  Description of Artificial Sequence: Synthetic oligonucleotide
ccaccuccugcuggugcuu

SEQ ID NO: 4136 - RNA, 19 nt, Artificial Sequence
  Description of Artificial Sequence: Synthetic oligonucleotide
uccaccuccugcuggugcu

SEQ ID NO: 4137 - RNA, 19 nt, Artificial Sequence
  Description of Artificial Sequence: Synthetic oligonucleotide
guccaccuccugcuggugc

SEQ ID NO: 4138 - RNA, 19 nt, Artificial Sequence
  Description of Artificial Sequence: Synthetic oligonucleotide
uguccaccuccugcuggug

SEQ ID NO: 4139 - RNA, 19 nt, Artificial Sequence
  Description of Artificial Sequence: Synthetic oligonucleotide
cuguccaccuccugcuggu

SEQ ID NO: 4140 - RNA, 19 nt, Artificial Sequence
  Description of Artificial Sequence: Synthetic oligonucleotide
ucuguccaccuccugcugg

SEQ ID NO: 4141 - RNA, 19 nt, Artificial Sequence
  Description of Artificial Sequence: Synthetic oligonucleotide
cucuguccaccuccugcug

SEQ ID NO: 4142 - RNA, 19 nt, Artificial Sequence
  Description of Artificial Sequence: Synthetic oligonucleotide
acucuguccaccuccugcu

SEQ ID NO: 4143 - RNA, 19 nt, Artificial Sequence
  Description of Artificial Sequence: Synthetic oligonucleotide
gacucuguccaccuccugc

SEQ ID NO: 4144 - RNA, 19 nt, Artificial Sequence
  Description of Artificial Sequence: Synthetic oligonucleotide
agacucuguccaccuccug

SEQ ID NO: 4145 - RNA, 19 nt, Artificial Sequence
  Description of Artificial Sequence: Synthetic oligonucleotide
gagacucuguccaccuccu

SEQ ID NO: 4146 - RNA, 19 nt, Artificial Sequence
  Description of Artificial Sequence: Synthetic oligonucleotide
agagacucuguccaccucc

SEQ ID NO: 4147 - RNA, 19 nt, Artificial Sequence
  Description of Artificial Sequence: Synthetic oligonucleotide
gagagacucuguccaccuc

SEQ ID NO: 4148 - RNA, 19 nt, Artificial Sequence
  Description of Artificial Sequence: Synthetic oligonucleotide
ugagagacucuguccaccu

SEQ ID NO: 4149 - RNA, 19 nt, Artificial Sequence
  Description of Artificial Sequence: Synthetic oligonucleotide
augagagacucuguccacc

SEQ ID NO: 4150 - RNA, 19 nt, Artificial Sequence
  Description of Artificial Sequence: Synthetic oligonucleotide
caugagagacucuguccac

SEQ ID NO: 4151 - RNA, 19 nt, Artificial Sequence
  Description of Artificial Sequence: Synthetic oligonucleotide
ccaugagagacucugucca

SEQ ID NO: 4152 - RNA, 19 nt, Artificial Sequence
  Description of Artificial Sequence: Synthetic oligonucleotide
uccaugagagacucugucc

SEQ ID NO: 4153 - RNA, 19 nt, Artificial Sequence
  Description of Artificial Sequence: Synthetic oligonucleotide
auccaugagagacucuguc

SEQ ID NO: 4154 - RNA, 19 nt, Artificial Sequence
  Description of Artificial Sequence: Synthetic oligonucleotide
cauccaugagagacucugu

SEQ ID NO: 4155 - RNA, 19 nt, Artificial Sequence
  Description of Artificial Sequence: Synthetic oligonucleotide
gcauccaugagagacucug

SEQ ID NO: 4156 - RNA, 19 nt, Artificial Sequence
  Description of Artificial Sequence: Synthetic oligonucleotide
ggcauccaugagagacucu

SEQ ID NO: 4157 - RNA, 19 nt, Artificial Sequence
  Description of Artificial Sequence: Synthetic oligonucleotide
cggcauccaugagagacuc

SEQ ID NO: 4158 - RNA, 19 nt, Artificial Sequence
  Description of Artificial Sequence: Synthetic oligonucleotide
ccggcauccaugagagacu

SEQ ID NO: 4159 - RNA, 19 nt, Artificial Sequence
  Description of Artificial Sequence: Synthetic oligonucleotide
gccggcauccaugagagac

SEQ ID NO: 4160 - RNA, 19 nt, Artificial Sequence
  Description of Artificial Sequence: Synthetic oligonucleotide
ugccggcauccaugagaga

SEQ ID NO: 4161 - RNA, 19 nt, Artificial Sequence
  Description of Artificial Sequence: Synthetic oligonucleotide
gugccggcauccaugagag

SEQ ID NO: 4162 - RNA, 19 nt, Artificial Sequence
  Description of Artificial Sequence: Synthetic oligonucleotide
ugugccggcauccaugaga

SEQ ID NO: 4163 - RNA, 19 nt, Artificial Sequence
  Description of Artificial Sequence: Synthetic oligonucleotide
uugugccggcauccaugag

SEQ ID NO: 4164 - RNA, 19 nt, Artificial Sequence
  Description of Artificial Sequence: Synthetic oligonucleotide
uuugugccggcauccauga

SEQ ID NO: 4165 - RNA, 19 nt, Artificial Sequence
  Description of Artificial Sequence: Synthetic oligonucleotide
uuuugugccggcauccaug

SEQ ID NO: 4166 - RNA, 19 nt, Artificial Sequence
  Description of Artificial Sequence: Synthetic oligonucleotide
guuuugugccggcauccau

SEQ ID NO: 4167 - RNA, 19 nt, Artificial Sequence
  Description of Artificial Sequence: Synthetic oligonucleotide
aguuuugugccggcaucca

SEQ ID NO: 4168 - RNA, 19 nt, Artificial Sequence
  Description of Artificial Sequence: Synthetic oligonucleotide
caguuuugugccggcaucc

SEQ ID NO: 4169 - RNA, 19 nt, Artificial Sequence
  Description of Artificial Sequence: Synthetic oligonucleotide
gcaguuuugugccggcauc

SEQ ID NO: 4170 - RNA, 19 nt, Artificial Sequence
  Description of Artificial Sequence: Synthetic oligonucleotide
ggcaguuuugugccggcau

SEQ ID NO: 4171 - RNA, 19 nt, Artificial Sequence
  Description of Artificial Sequence: Synthetic oligonucleotide
aggcaguuuugugccggca

SEQ ID NO: 4172 - RNA, 19 nt, Artificial Sequence
  Description of Artificial Sequence: Synthetic oligonucleotide
aaggcaguuuugugccggc

SEQ ID NO: 4173 - RNA, 19 nt, Artificial Sequence
  Description of Artificial Sequence: Synthetic oligonucleotide
uaaggcaguuuugugccgg

SEQ ID NO: 4174 - RNA, 19 nt, Artificial Sequence
  Description of Artificial Sequence: Synthetic oligonucleotide
uuaaggcaguuuugugccg

SEQ ID NO: 4175 - RNA, 19 nt, Artificial Sequence
  Description of Artificial Sequence: Synthetic oligonucleotide
uuuaaggcaguuuugugcc

SEQ ID NO: 4176 - RNA, 19 nt, Artificial Sequence
  Description of Artificial Sequence: Synthetic oligonucleotide
uuuuaaggcaguuuugugc

SEQ ID NO: 4177 - RNA, 19 nt, Artificial Sequence
  Description of Artificial Sequence: Synthetic oligonucleotide
auuuuaaggcaguuuugug

SEQ ID NO: 4178 - RNA, 19 nt, Artificial Sequence
  Description of Artificial Sequence: Synthetic oligonucleotide
uauuuuaaggcaguuuugu

SEQ ID NO: 4179 - RNA, 19 nt, Artificial Sequence
  Description of Artificial Sequence: Synthetic oligonucleotide
auauuuuaaggcaguuuug

SEQ ID NO: 4180 - RNA, 19 nt, Artificial Sequence
  Description of Artificial Sequence: Synthetic oligonucleotide
aauauuuuaaggcaguuuu

SEQ ID NO: 4181 - RNA, 19 nt, Artificial Sequence
  Description of Artificial Sequence: Synthetic oligonucleotide
gaauauuuuaaggcaguuu

SEQ ID NO: 4182 - RNA, 19 nt, Artificial Sequence
  Description of Artificial Sequence: Synthetic oligonucleotide
ugaauauuuuaaggcaguu

SEQ ID NO: 4183 - RNA, 19 nt, Artificial Sequence
  Description of Artificial Sequence: Synthetic oligonucleotide
augaauauuuuaaggcagu

SEQ ID NO: 4184 - RNA, 19 nt, Artificial Sequence
  Description of Artificial Sequence: Synthetic oligonucleotide
uaugaauauuuuaaggcag

SEQ ID NO: 4185 - RNA, 19 nt, Artificial Sequence
  Description of Artificial Sequence: Synthetic oligonucleotide
cuaugaauauuuuaaggca

SEQ ID NO: 4186 - RNA, 19 nt, Artificial Sequence
  Description of Artificial Sequence: Synthetic oligonucleotide
acuaugaauauuuuaaggc

SEQ ID NO: 4187 - RNA, 19 nt, Artificial Sequence
  Description of Artificial Sequence: Synthetic oligonucleotide
aacuaugaauauuuuaagg

SEQ ID NO: 4188 - RNA, 19 nt, Artificial Sequence
  Description of Artificial Sequence: Synthetic oligonucleotide
uaacuaugaauauuuuaag

SEQ ID NO: 4189 - RNA, 19 nt, Artificial Sequence
  Description of Artificial Sequence: Synthetic oligonucleotide
uuaacuaugaauauuuuaa

SEQ ID NO: 4190 - RNA, 19 nt, Artificial Sequence
  Description of Artificial Sequence: Synthetic oligonucleotide
auuaacuaugaauauuuua

SEQ ID NO: 4191 - RNA, 19 nt, Artificial Sequence
  Description of Artificial Sequence: Synthetic oligonucleotide
uauuaacuaugaauauuuu

SEQ ID NO: 4192 - RNA, 19 nt, Artificial Sequence
  Description of Artificial Sequence: Synthetic oligonucleotide
guauuaacuaugaauauuu

SEQ ID NO: 4193 - RNA, 19 nt, Artificial Sequence
  Description of Artificial Sequence: Synthetic oligonucleotide
uguauuaacuaugaauauu

SEQ ID NO: 4194 - RNA, 19 nt, Artificial Sequence
  Description of Artificial Sequence: Synthetic oligonucleotide
cuguauuaacuaugaauau

SEQ ID NO: 4195 - RNA, 19 nt, Artificial Sequence
  Description of Artificial Sequence: Synthetic oligonucleotide
ccuguauuaacuaugaaua

SEQ ID NO: 4196 - RNA, 19 nt, Artificial Sequence
  Description of Artificial Sequence: Synthetic oligonucleotide
accuguauuaacuaugaau

SEQ ID NO: 4197 - RNA, 19 nt, Artificial Sequence
  Description of Artificial Sequence: Synthetic oligonucleotide
uaccuguauuaacuaugaa

SEQ ID NO: 4198 - RNA, 19 nt, Artificial Sequence
  Description of Artificial Sequence: Synthetic oligonucleotide
auaccuguauuaacuauga

SEQ ID NO: 4199 - RNA, 19 nt, Artificial Sequence
  Description of Artificial Sequence: Synthetic oligonucleotide
uauaccuguauuaacuaug

SEQ ID NO: 4200 - RNA, 19 nt, Artificial Sequence
  Description of Artificial Sequence: Synthetic oligonucleotide
auauaccuguauuaacuau

SEQ ID NO: 4201 - RNA, 19 nt, Artificial Sequence
  Description of Artificial Sequence: Synthetic oligonucleotide
gauauaccuguauuaacua

SEQ ID NO: 4202 - RNA, 19 nt, Artificial Sequence
  Description of Artificial Sequence: Synthetic oligonucleotide
agauauaccuguauuaacu

SEQ ID NO: 4203 - RNA, 19 nt, Artificial Sequence
  Description of Artificial Sequence: Synthetic oligonucleotide
uagauauaccuguauuaac

SEQ ID NO: 4204 - RNA, 19 nt, Artificial Sequence
  Description of Artificial Sequence: Synthetic oligonucleotide
auagauauaccuguauuaa

SEQ ID NO: 4205 - RNA, 19 nt, Artificial Sequence
  Description of Artificial Sequence: Synthetic oligonucleotide
aauagauauaccuguauua

SEQ ID NO: 4206 - RNA, 19 nt, Artificial Sequence
  Description of Artificial Sequence: Synthetic oligonucleotide
aaauagauauaccuguauu

SEQ ID NO: 4207 - RNA, 19 nt, Artificial Sequence
  Description of Artificial Sequence: Synthetic oligonucleotide
aaaauagauauaccuguau

SEQ ID NO: 4208 - RNA, 19 nt, Artificial Sequence
  Description of Artificial Sequence: Synthetic oligonucleotide
aaaaauagauauaccugua

SEQ ID NO: 4209 - RNA, 19 nt, Artificial Sequence
  Description of Artificial Sequence: Synthetic oligonucleotide
uaaaaauagauauaccugu

SEQ ID NO: 4210 - RNA, 19 nt, Artificial Sequence
  Description of Artificial Sequence: Synthetic oligonucleotide
auaaaaauagauauaccug

SEQ ID NO: 4211 - RNA, 19 nt, Artificial Sequence
  Description of Artificial Sequence: Synthetic oligonucleotide
aauaaaaauagauauaccu

SEQ ID NO: 4212 - RNA, 19 nt, Artificial Sequence
  Description of Artificial Sequence: Synthetic oligonucleotide
aaauaaaaauagauauacc

SEQ ID NO: 4213 - RNA, 19 nt, Artificial Sequence
  Description of Artificial Sequence: Synthetic oligonucleotide
uaaauaaaaauagauauac

SEQ ID NO: 4214 - RNA, 19 nt, Artificial Sequence
  Description of Artificial Sequence: Synthetic oligonucleotide
guaaauaaaaauagauaua

SEQ ID NO: 4215 - RNA, 19 nt, Artificial Sequence
  Description of Artificial Sequence: Synthetic oligonucleotide
aguaaauaaaaauagauau

SEQ ID NO: 4216 - RNA, 19 nt, Artificial Sequence
  Description of Artificial Sequence: Synthetic oligonucleotide
aaguaaauaaaaauagaua

SEQ ID NO: 4217 - RNA, 19 nt, Artificial Sequence
  Description of Artificial Sequence: Synthetic oligonucleotide
aaaguaaauaaaaauagau

SEQ ID NO: 4218 - RNA, 19 nt, Artificial Sequence
  Description of Artificial Sequence: Synthetic oligonucleotide
caaaguaaauaaaaauaga

SEQ ID NO: 4219 - RNA, 19 nt, Artificial Sequence
  Description of Artificial Sequence: Synthetic oligonucleotide
acaaaguaaauaaaaauag

SEQ ID NO: 4220 - RNA, 19 nt, Artificial Sequence
  Description of Artificial Sequence: Synthetic oligonucleotide
uacaaaguaaauaaaaaua

SEQ ID NO: 4221 - RNA, 19 nt, Artificial Sequence
  Description of Artificial Sequence: Synthetic oligonucleotide
uuacaaaguaaauaaaaau

SEQ ID NO: 4222 - RNA, 19 nt, Artificial Sequence
  Description of Artificial Sequence: Synthetic oligonucleotide
cuuacaaaguaaauaaaaa

SEQ ID NO: 4223 - RNA, 19 nt, Artificial Sequence
  Description of Artificial Sequence: Synthetic oligonucleotide
ucuuacaaaguaaauaaaa

SEQ ID NO: 4224 - RNA, 19 nt, Artificial Sequence
  Description of Artificial Sequence: Synthetic oligonucleotide
uucuuacaaaguaaauaaa

SEQ ID NO: 4225 - RNA, 19 nt, Artificial Sequence
  Description of Artificial Sequence: Synthetic oligonucleotide
uuucuuacaaaguaaauaa

SEQ ID NO: 4226 - RNA, 19 nt, Artificial Sequence
  Description of Artificial Sequence: Synthetic oligonucleotide
guuucuuacaaaguaaaua

SEQ ID NO: 4227 - RNA, 19 nt, Artificial Sequence
  Description of Artificial Sequence: Synthetic oligonucleotide
uguuucuuacaaaguaaau

SEQ ID NO: 4228 - RNA, 19 nt, Artificial Sequence
  Description of Artificial Sequence: Synthetic oligonucleotide
uuguuucuuacaaaguaaa

SEQ ID NO: 4229 - RNA, 19 nt, Artificial Sequence
  Description of Artificial Sequence: Synthetic oligonucleotide
cuuguuucuuacaaaguaa

SEQ ID NO: 4230 - RNA, 19 nt, Artificial Sequence
  Description of Artificial Sequence: Synthetic oligonucleotide
gcuuguuucuuacaaagua

SEQ ID NO: 4231 - RNA, 19 nt, Artificial Sequence
  Description of Artificial Sequence: Synthetic oligonucleotide
agcuuguuucuuacaaagu

SEQ ID NO: 4232 - RNA, 19 nt, Artificial Sequence
  Description of Artificial Sequence: Synthetic oligonucleotide
gagcuuguuucuuacaaag

SEQ ID NO: 4233 - RNA, 19 nt, Artificial Sequence
  Description of Artificial Sequence: Synthetic oligonucleotide
ugagcuuguuucuuacaaa

SEQ ID NO: 4234 - RNA, 19 nt, Artificial Sequence
  Description of Artificial Sequence: Synthetic oligonucleotide
uugagcuuguuucuuacaa

SEQ ID NO: 4235 - RNA, 19 nt, Artificial Sequence
  Description of Artificial Sequence: Synthetic oligonucleotide
cuugagcuuguuucuuaca

SEQ ID NO: 4236 - RNA, 19 nt, Artificial Sequence
  Description of Artificial Sequence: Synthetic oligonucleotide
ccuugagcuuguuucuuac

SEQ ID NO: 4237 - RNA, 19 nt, Artificial Sequence
  Description of Artificial Sequence: Synthetic oligonucleotide
uccuugagcuuguuucuua

SEQ ID NO: 4238 - RNA, 19 nt, Artificial Sequence
  Description of Artificial Sequence: Synthetic oligonucleotide
cuccuugagcuuguuucuu

SEQ ID NO: 4239 - RNA, 19 nt, Artificial Sequence
  Description of Artificial Sequence: Synthetic oligonucleotide
gcuccuugagcuuguuucu

SEQ ID NO: 4240 - RNA, 19 nt, Artificial Sequence
  Description of Artificial Sequence: Synthetic oligonucleotide
agcuccuugagcuuguuuc

SEQ ID NO: 4241 - RNA, 19 nt, Artificial Sequence
  Description of Artificial Sequence: Synthetic oligonucleotide
aagcuccuugagcuuguuu

SEQ ID NO: 4242 - RNA, 19 nt, Artificial Sequence
  Description of Artificial Sequence: Synthetic oligonucleotide
gaagcuccuugagcuuguu

SEQ ID NO: 4243 - RNA, 19 nt, Artificial Sequence
  Description of Artificial Sequence: Synthetic oligonucleotide
ggaagcuccuugagcuugu

SEQ ID NO: 4244 - RNA, 19 nt, Artificial Sequence
  Description of Artificial Sequence: Synthetic oligonucleotide
aggaagcuccuugagcuug

SEQ ID NO: 4245 - RNA, 19 nt, Artificial Sequence
  Description of Artificial Sequence: Synthetic oligonucleotide
aaggaagcuccuugagcuu

SEQ ID NO: 4246 - RNA, 19 nt, Artificial Sequence
  Description of Artificial Sequence: Synthetic oligonucleotide
aaaggaagcuccuugagcu

SEQ ID NO: 4247 - RNA, 19 nt, Artificial Sequence
  Description of Artificial Sequence: Synthetic oligonucleotide
aaaaggaagcuccuugagc

SEQ ID NO: 4248 - RNA, 19 nt, Artificial Sequence
  Description of Artificial Sequence: Synthetic oligonucleotide
uaaaaggaagcuccuugag

SEQ ID NO: 4249 - RNA, 19 nt, Artificial Sequence
  Description of Artificial Sequence: Synthetic oligonucleotide
uuaaaaggaagcuccuuga

SEQ ID NO: 4250 - RNA, 19 nt, Artificial Sequence
  Description of Artificial Sequence: Synthetic oligonucleotide
uuuaaaaggaagcuccuug

SEQ ID NO: 4251 - RNA, 19 nt, Artificial Sequence
  Description of Artificial Sequence: Synthetic oligonucleotide
auuuaaaaggaagcuccuu

SEQ ID NO: 4252 - RNA, 19 nt, Artificial Sequence
  Description of Artificial Sequence: Synthetic oligonucleotide
aauuuaaaaggaagcuccu

SEQ ID NO: 4253 - RNA, 19 nt, Artificial Sequence
  Description of Artificial Sequence: Synthetic oligonucleotide
aaauuuaaaaggaagcucc

SEQ ID NO: 4254 - RNA, 19 nt, Artificial Sequence
  Description of Artificial Sequence: Synthetic oligonucleotide
aaaauuuaaaaggaagcuc

SEQ ID NO: 4255 - RNA, 19 nt, Artificial Sequence
  Description of Artificial Sequence: Synthetic oligonucleotide
caaaauuuaaaaggaagcu

SEQ ID NO: 4256 - RNA, 19 nt, Artificial Sequence
  Description of Artificial Sequence: Synthetic oligonucleotide
acaaaauuuaaaaggaagc

SEQ ID NO: 4257 - RNA, 19 nt, Artificial Sequence
  Description of Artificial Sequence: Synthetic oligonucleotide
gacaaaauuuaaaaggaag

SEQ ID NO: 4258 - RNA, 19 nt, Artificial Sequence
  Description of Artificial Sequence: Synthetic oligonucleotide
agacaaaauuuaaaaggaa

SEQ ID NO: 4259 - RNA, 19 nt, Artificial Sequence
  Description of Artificial Sequence: Synthetic oligonucleotide
cagacaaaauuuaaaagga

SEQ ID NO: 4260 - RNA, 19 nt, Artificial Sequence
  Description of Artificial Sequence: Synthetic oligonucleotide
acagacaaaauuuaaaagg

SEQ ID NO: 4261 - RNA, 19 nt, Artificial Sequence
  Description of Artificial Sequence: Synthetic oligonucleotide
uacagacaaaauuuaaaag

SEQ ID NO: 4262 - RNA, 19 nt, Artificial Sequence
  Description of Artificial Sequence: Synthetic oligonucleotide
cuacagacaaaauuuaaaa

SEQ ID NO: 4263 - RNA, 19 nt, Artificial Sequence
  Description of Artificial Sequence: Synthetic oligonucleotide
ccuacagacaaaauuuaaa

SEQ ID NO: 4264 - RNA, 19 nt, Artificial Sequence
  Description of Artificial Sequence: Synthetic oligonucleotide
uccuacagacaaaauuuaa

SEQ ID NO: 4265 - RNA, 19 nt, Artificial Sequence
  Description of Artificial Sequence: Synthetic oligonucleotide
uuccuacagacaaaauuua

SEQ ID NO: 4266 - RNA, 19 nt, Artificial Sequence
  Description of Artificial Sequence: Synthetic oligonucleotide
uuuccuacagacaaaauuu

SEQ ID NO: 4267 - RNA, 19 nt, Artificial Sequence
  Description of Artificial Sequence: Synthetic oligonucleotide
auuuccuacagacaaaauu

SEQ ID NO: 4268 - RNA, 19 nt, Artificial Sequence
  Description of Artificial Sequence: Synthetic oligonucleotide
cauuuccuacagacaaaau

SEQ ID NO: 4269 - RNA, 19 nt, Artificial Sequence
  Description of Artificial Sequence: Synthetic oligonucleotide
ccauuuccuacagacaaaa

SEQ ID NO: 4270 - RNA, 19 nt, Artificial Sequence
  Description of Artificial Sequence: Synthetic oligonucleotide
accauuuccuacagacaaa

SEQ ID NO: 4271 - RNA, 19 nt, Artificial Sequence
  Description of Artificial Sequence: Synthetic oligonucleotide
aaccauuuccuacagacaa

SEQ ID NO: 4272 - RNA, 19 nt, Artificial Sequence
  Description of Artificial Sequence: Synthetic oligonucleotide
caaccauuuccuacagaca

SEQ ID NO: 4273 - RNA, 19 nt, Artificial Sequence
  Description of Artificial Sequence: Synthetic oligonucleotide
ucaaccauuuccuacagac

SEQ ID NO: 4274 - RNA, 19 nt, Artificial Sequence
  Description of Artificial Sequence: Synthetic oligonucleotide
uucaaccauuuccuacaga

SEQ ID NO: 4275 - RNA, 19 nt, Artificial Sequence
  Description of Artificial Sequence: Synthetic oligonucleotide
uuucaaccauuuccuacag

SEQ ID NO: 4276 - RNA, 19 nt, Artificial Sequence
  Description of Artificial Sequence: Synthetic oligonucleotide
uuuucaaccauuuccuaca

SEQ ID NO: 4277 - RNA, 19 nt, Artificial Sequence
  Description of Artificial Sequence: Synthetic oligonucleotide
guuuucaaccauuuccuac

SEQ ID NO: 4278 - RNA, 19 nt, Artificial Sequence
  Description of Artificial Sequence: Synthetic oligonucleotide
aguuuucaaccauuuccua

SEQ ID NO: 4279 - RNA, 19 nt, Artificial Sequence
  Description of Artificial Sequence: Synthetic oligonucleotide
caguuuucaaccauuuccu

SEQ ID NO: 4280 - RNA, 19 nt, Artificial Sequence
  Description of Artificial Sequence: Synthetic oligonucleotide
ucaguuuucaaccauuucc

SEQ ID NO: 4281 - RNA, 19 nt, Artificial Sequence
  Description of Artificial Sequence: Synthetic oligonucleotide
uucaguuuucaaccauuuc

SEQ ID NO: 4282 - RNA, 19 nt, Artificial Sequence
  Description of Artificial Sequence: Synthetic oligonucleotide
cuucaguuuucaaccauuu

SEQ ID NO: 4283 - RNA, 19 nt, Artificial Sequence
  Description of Artificial Sequence: Synthetic oligonucleotide
ccuucaguuuucaaccauu

SEQ ID NO: 4284 - RNA, 19 nt, Artificial Sequence
  Description of Artificial Sequence: Synthetic oligonucleotide
accuucaguuuucaaccau

SEQ ID NO: 4285 - RNA, 19 nt, Artificial Sequence
  Description of Artificial Sequence: Synthetic oligonucleotide
uaccuucaguuuucaacca

SEQ ID NO: 4286 - RNA, 19 nt, Artificial Sequence
  Description of Artificial Sequence: Synthetic oligonucleotide
cuaccuucaguuuucaacc

SEQ ID NO: 4287 - RNA, 19 nt, Artificial Sequence
  Description of Artificial Sequence: Synthetic oligonucleotide
ucuaccuucaguuuucaac

SEQ ID NO: 4288 - RNA, 19 nt, Artificial Sequence
  Description of Artificial Sequence: Synthetic oligonucleotide
aucuaccuucaguuuucaa

SEQ ID NO: 4289 - RNA, 19 nt, Artificial Sequence
  Description of Artificial Sequence: Synthetic oligonucleotide
caucuaccuucaguuuuca

SEQ ID NO: 4290 - RNA, 19 nt, Artificial Sequence
  Description of Artificial Sequence: Synthetic oligonucleotide
ccaucuaccuucaguuuuc

SEQ ID NO: 4291 - RNA, 19 nt, Artificial Sequence
  Description of Artificial Sequence: Synthetic oligonucleotide
accaucuaccuucaguuuu

SEQ ID NO: 4292 - RNA, 19 nt, Artificial Sequence
  Description of Artificial Sequence: Synthetic oligonucleotide
caccaucuaccuucaguuu

SEQ ID NO: 4293 - RNA, 19 nt, Artificial Sequence
  Description of Artificial Sequence: Synthetic oligonucleotide
acaccaucuaccuucaguu

SEQ ID NO: 4294 - RNA, 19 nt, Artificial Sequence
  Description of Artificial Sequence: Synthetic oligonucleotide
aacaccaucuaccuucagu

SEQ ID NO: 4295 - RNA, 19 nt, Artificial Sequence
  Description of Artificial Sequence: Synthetic oligonucleotide
uaacaccaucuaccuucag

SEQ ID NO: 4296 - RNA, 19 nt, Artificial Sequence
  Description of Artificial Sequence: Synthetic oligonucleotide
auaacaccaucuaccuuca

SEQ ID NO: 4297 - RNA, 19 nt, Artificial Sequence
  Description of Artificial Sequence: Synthetic oligonucleotide
uauaacaccaucuaccuuc

SEQ ID NO: 4298 - RNA, 19 nt, Artificial Sequence
  Description of Artificial Sequence: Synthetic oligonucleotide
cuauaacaccaucuaccuu

SEQ ID NO: 4299 - RNA, 19 nt, Artificial Sequence
  Description of Artificial Sequence: Synthetic oligonucleotide
acuauaacaccaucuaccu

SEQ ID NO: 4300 - RNA, 19 nt, Artificial Sequence
  Description of Artificial Sequence: Synthetic oligonucleotide
aacuauaacaccaucuacc

SEQ ID NO: 4301 - RNA, 19 nt, Artificial Sequence
  Description of Artificial Sequence: Synthetic oligonucleotide
uaacuauaacaccaucuac

SEQ ID NO: 4302 - RNA, 19 nt, Artificial Sequence
  Description of Artificial Sequence: Synthetic oligonucleotide
uuaacuauaacaccaucua

SEQ ID NO: 4303 - RNA, 19 nt, Artificial Sequence
  Description of Artificial Sequence: Synthetic oligonucleotide
auuaacuauaacaccaucu

SEQ ID NO: 4304 - RNA, 19 nt, Artificial Sequence
  Description of Artificial Sequence: Synthetic oligonucleotide
uauuaacuauaacaccauc

SEQ ID NO: 4305 - RNA, 19 nt, Artificial Sequence
  Description of Artificial Sequence: Synthetic oligonucleotide
uuauuaacuauaacaccau

SEQ ID NO: 4306 - RNA, 19 nt, Artificial Sequence
  Description of Artificial Sequence: Synthetic oligonucleotide
auuauuaacuauaacacca

SEQ ID NO: 4307 - RNA, 19 nt, Artificial Sequence
  Description of Artificial Sequence: Synthetic oligonucleotide
uauuauuaacuauaacacc

SEQ ID NO: 4308 - RNA, 19 nt, Artificial Sequence
  Description of Artificial Sequence: Synthetic oligonucleotide
uuauuauuaacuauaacac

SEQ ID NO: 4309 - RNA, 19 nt, Artificial Sequence
  Description of Artificial Sequence: Synthetic oligonucleotide
uuuauuauuaacuauaaca

SEQ ID NO: 4310 - RNA, 19 nt, Artificial Sequence
  Description of Artificial Sequence: Synthetic oligonucleotide
auuuauuauuaacuauaac

SEQ ID NO: 4311 - RNA, 19 nt, Artificial Sequence
  Description of Artificial Sequence: Synthetic oligonucleotide
cauuuauuauuaacuauaa

SEQ ID NO: 4312 - RNA, 19 nt, Artificial Sequence
  Description of Artificial Sequence: Synthetic oligonucleotide
gcauuuauuauuaacuaua

SEQ ID NO: 4313 - RNA, 19 nt, Artificial Sequence
  Description of Artificial Sequence: Synthetic oligonucleotide
agcauuuauuauuaacuau

SEQ ID NO: 4314 - RNA, 19 nt, Artificial Sequence
  Description of Artificial Sequence: Synthetic oligonucleotide
cagcauuuauuauuaacua

SEQ ID NO: 4315 - RNA, 19 nt, Artificial Sequence
  Description of Artificial Sequence: Synthetic oligonucleotide
acagcauuuauuauuaacu

SEQ ID NO: 4316 - RNA, 19 nt, Artificial Sequence
  Description of Artificial Sequence: Synthetic oligonucleotide
uacagcauuuauuauuaac

SEQ ID NO: 4317 - RNA, 19 nt, Artificial Sequence
  Description of Artificial Sequence: Synthetic oligonucleotide
uuacagcauuuauuauuaa

SEQ ID NO: 4318 - RNA, 19 nt, Artificial Sequence
  Description of Artificial Sequence: Synthetic oligonucleotide
uuuacagcauuuauuauua

SEQ ID NO: 4319 - RNA, 19 nt, Artificial Sequence
  Description of Artificial Sequence: Synthetic oligonucleotide
auuuacagcauuuauuauu

SEQ ID NO: 4320 - RNA, 19 nt, Artificial Sequence
  Description of Artificial Sequence: Synthetic oligonucleotide
uauuuacagcauuuauuau

SEQ ID NO: 4321 - RNA, 19 nt, Artificial Sequence
  Description of Artificial Sequence: Synthetic oligonucleotide
uuauuuacagcauuuauua

SEQ ID NO: 4322 - RNA, 19 nt, Artificial Sequence
  Description of Artificial Sequence: Synthetic oligonucleotide
cuuauuuacagcauuuauu

SEQ ID NO: 4323 - RNA, 19 nt, Artificial Sequence
  Description of Artificial Sequence: Synthetic oligonucleotide
gcuuauuuacagcauuuau

SEQ ID NO: 4324 - RNA, 19 nt, Artificial Sequence
  Description of Artificial Sequence: Synthetic oligonucleotide
ugcuuauuuacagcauuua

SEQ ID NO: 4325 - RNA, 19 nt, Artificial Sequence
  Description of Artificial Sequence: Synthetic oligonucleotide
augcuuauuuacagcauuu

SEQ ID NO: 4326 - RNA, 19 nt, Artificial Sequence
  Description of Artificial Sequence: Synthetic oligonucleotide
gaugcuuauuuacagcauu

SEQ ID NO: 4327 - RNA, 19 nt, Artificial Sequence
  Description of Artificial Sequence: Synthetic oligonucleotide
agaugcuuauuuacagcau

SEQ ID NO: 4328 - RNA, 19 nt, Artificial Sequence
  Description of Artificial Sequence: Synthetic oligonucleotide
gagaugcuuauuuacagca

SEQ ID NO: 4329 - RNA, 19 nt, Artificial Sequence
  Description of Artificial Sequence: Synthetic oligonucleotide
ugagaugcuuauuuacagc

SEQ ID NO: 4330 - RNA, 19 nt, Artificial Sequence
  Description of Artificial Sequence: Synthetic oligonucleotide
gugagaugcuuauuuacag

SEQ ID NO: 4331 - RNA, 19 nt, Artificial Sequence
  Description of Artificial Sequence: Synthetic oligonucleotide
agugagaugcuuauuuaca

SEQ ID NO: 4332 - RNA, 19 nt, Artificial Sequence
  Description of Artificial Sequence: Synthetic oligonucleotide
aagugagaugcuuauuuac

SEQ ID NO: 4333 - RNA, 19 nt, Artificial Sequence
  Description of Artificial Sequence: Synthetic oligonucleotide
aaagugagaugcuuauuua

SEQ ID NO: 4334 - RNA, 19 nt, Artificial Sequence
  Description of Artificial Sequence: Synthetic oligonucleotide
caaagugagaugcuuauuu

SEQ ID NO: 4335 - RNA, 19 nt, Artificial Sequence
  Description of Artificial Sequence: Synthetic oligonucleotide
acaaagugagaugcuuauu

SEQ ID NO: 4336 - RNA, 19 nt, Artificial Sequence
  Description of Artificial Sequence: Synthetic oligonucleotide
uacaaagugagaugcuuau

SEQ ID NO: 4337 - RNA, 19 nt, Artificial Sequence
  Description of Artificial Sequence: Synthetic oligonucleotide
uuacaaagugagaugcuua

SEQ ID NO: 4338 - RNA, 19 nt, Artificial Sequence
  Description of Artificial Sequence: Synthetic oligonucleotide
uuuacaaagugagaugcuu

SEQ ID NO: 4339 - RNA, 19 nt, Artificial Sequence
  Description of Artificial Sequence: Synthetic oligonucleotide
uuuuacaaagugagaugcu

SEQ ID NO: 4340 - RNA, 19 nt, Artificial Sequence
  Description of Artificial Sequence: Synthetic oligonucleotide
uuuuuacaaagugagaugc

SEQ ID NO: 4341 - RNA, 19 nt, Artificial Sequence
  Description of Artificial Sequence: Synthetic oligonucleotide
auuuuuacaaagugagaug

SEQ ID NO: 4342 - RNA, 19 nt, Artificial Sequence
  Description of Artificial Sequence: Synthetic oligonucleotide
uauuuuuacaaagugagau

SEQ ID NO: 4343 - RNA, 19 nt, Artificial Sequence
  Description of Artificial Sequence: Synthetic oligonucleotide
uuauuuuuacaaagugaga

SEQ ID NO: 4344 - RNA, 19 nt, Artificial Sequence
  Description of Artificial Sequence: Synthetic oligonucleotide
uuuauuuuuacaaagugag

SEQ ID NO: 4345 - RNA, 19 nt, Artificial Sequence
  Description of Artificial Sequence: Synthetic oligonucleotide
uuuuauuuuuacaaaguga

SEQ ID NO: 4346 - RNA, 19 nt, Artificial Sequence
  Description of Artificial Sequence: Synthetic oligonucleotide
auuuuauuuuuacaaagug

SEQ ID NO: 4347 - RNA, 19 nt, Artificial Sequence
  Description of Artificial Sequence: Synthetic oligonucleotide
uauuuuauuuuuacaaagu

SEQ ID NO: 4348 - RNA, 19 nt, Artificial Sequence
  Description of Artificial Sequence: Synthetic oligonucleotide
auauuuuauuuuuacaaag

SEQ ID NO: 4349 - RNA, 19 nt, Artificial Sequence
  Description of Artificial Sequence: Synthetic oligonucleotide
aauauuuuauuuuuacaaa

SEQ ID NO: 4350 - RNA, 19 nt, Artificial Sequence
  Description of Artificial Sequence: Synthetic oligonucleotide
caauauuuuauuuuuacaa

SEQ ID NO: 4351 - RNA, 19 nt, Artificial Sequence
  Description of Artificial Sequence: Synthetic oligonucleotide
acaauauuuuauuuuuaca

SEQ ID NO: 4352 - RNA, 19 nt, Artificial Sequence
  Description of Artificial Sequence: Synthetic oligonucleotide
cacaauauuuuauuuuuac

SEQ ID NO: 4353 - RNA, 19 nt, Artificial Sequence
  Description of Artificial Sequence: Synthetic oligonucleotide
ccacaauauuuuauuuuua

SEQ ID NO: 4354 - RNA, 19 nt, Artificial Sequence
  Description of Artificial Sequence: Synthetic oligonucleotide
accacaauauuuuauuuuu

SEQ ID NO: 4355 - RNA, 19 nt, Artificial Sequence
  Description of Artificial Sequence: Synthetic oligonucleotide
aaccacaauauuuuauuuu

SEQ ID NO: 4356 - RNA, 19 nt, Artificial Sequence
  Description of Artificial Sequence: Synthetic oligonucleotide
aaaccacaauauuuuauuu

SEQ ID NO: 4357 - RNA, 19 nt, Artificial Sequence
  Description of Artificial Sequence: Synthetic oligonucleotide
aaaaccacaauauuuuauu

SEQ ID NO: 4358 - RNA, 19 nt, Artificial Sequence
  Description of Artificial Sequence: Synthetic oligonucleotide
caaaaccacaauauuuuau

SEQ ID NO: 4359 - RNA, 19 nt, Artificial Sequence
  Description of Artificial Sequence: Synthetic oligonucleotide
acaaaaccacaauauuuua

SEQ ID NO: 4360 - RNA, 19 nt, Artificial Sequence
  Description of Artificial Sequence: Synthetic oligonucleotide
aacaaaaccacaauauuuu

SEQ ID NO: 4361 - RNA, 19 nt, Artificial Sequence
  Description of Artificial Sequence: Synthetic oligonucleotide
aaacaaaaccacaauauuu

SEQ ID NO: 4362 - RNA, 19 nt, Artificial Sequence
  Description of Artificial Sequence: Synthetic oligonucleotide
aaaacaaaaccacaauauu

SEQ ID NO: 4363 - RNA, 19 nt, Artificial Sequence
  Description of Artificial Sequence: Synthetic oligonucleotide
uaaaacaaaaccacaauau

SEQ ID NO: 4364 - RNA, 19 nt, Artificial Sequence
  Description of Artificial Sequence: Synthetic oligonucleotide
uuaaaacaaaaccacaaua

SEQ ID NO: 4365 - RNA, 19 nt, Artificial Sequence
  Description of Artificial Sequence: Synthetic oligonucleotide
uuuaaaacaaaaccacaau

SEQ ID NO: 4366 - RNA, 19 nt, Artificial Sequence
  Description of Artificial Sequence: Synthetic oligonucleotide
guuuaaaacaaaaccacaa

SEQ ID NO: 4367 - RNA, 19 nt, Artificial Sequence
  Description of Artificial Sequence: Synthetic oligonucleotide
uguuuaaaacaaaaccaca

SEQ ID NO: 4368 - RNA, 19 nt, Artificial Sequence
  Description of Artificial Sequence: Synthetic oligonucleotide
auguuuaaaacaaaaccac

SEQ ID NO: 4369 - RNA, 19 nt, Artificial Sequence
  Description of Artificial Sequence: Synthetic oligonucleotide
aauguuuaaaacaaaacca

SEQ ID NO: 4370 - RNA, 19 nt, Artificial Sequence
  Description of Artificial Sequence: Synthetic oligonucleotide
gaauguuuaaaacaaaacc

SEQ ID NO: 4371 - RNA, 19 nt, Artificial Sequence
  Description of Artificial Sequence: Synthetic oligonucleotide
ugaauguuuaaaacaaaac

SEQ ID NO: 4372 - RNA, 19 nt, Artificial Sequence
  Description of Artificial Sequence: Synthetic oligonucleotide
uugaauguuuaaaacaaaa

SEQ ID NO: 4373 - RNA, 19 nt, Artificial Sequence
  Description of Artificial Sequence: Synthetic oligonucleotide
guugaauguuuaaaacaaa

SEQ ID NO: 4374 - RNA, 19 nt, Artificial Sequence
  Description of Artificial Sequence: Synthetic oligonucleotide
cguugaauguuuaaaacaa

SEQ ID NO: 4375 - RNA, 19 nt, Artificial Sequence
  Description of Artificial Sequence: Synthetic oligonucleotide
acguugaauguuuaaaaca

SEQ ID NO: 4376 - RNA, 19 nt, Artificial Sequence
  Description of Artificial Sequence: Synthetic oligonucleotide
aacguugaauguuuaaaac

SEQ ID NO: 4377 - RNA, 19 nt, Artificial Sequence
  Description of Artificial Sequence: Synthetic oligonucleotide
aaacguugaauguuuaaaa

SEQ ID NO: 4378 - RNA, 19 nt, Artificial Sequence
  Description of Artificial Sequence: Synthetic oligonucleotide
gaaacguugaauguuuaaa

SEQ ID NO: 4379 - RNA, 19 nt, Artificial Sequence
  Description of Artificial Sequence: Synthetic oligonucleotide
agaaacguugaauguuuaa

SEQ ID NO: 4380 - RNA, 19 nt, Artificial Sequence
  Description of Artificial Sequence: Synthetic oligonucleotide
aagaaacguugaauguuua

SEQ ID NO: 4381 - RNA, 19 nt, Artificial Sequence
  Description of Artificial Sequence: Synthetic oligonucleotide
aaagaaacguugaauguuu

SEQ ID NO: 4382 - RNA, 19 nt, Artificial Sequence
  Description of Artificial Sequence: Synthetic oligonucleotide
aaaagaaacguugaauguu

SEQ ID NO: 4383 - RNA, 19 nt, Artificial Sequence
  Description of Artificial Sequence: Synthetic oligonucleotide
gaaaagaaacguugaaugu

SEQ ID NO: 4384 - RNA, 19 nt, Artificial Sequence
  Description of Artificial Sequence: Synthetic oligonucleotide
ggaaaagaaacguugaaug

SEQ ID NO: 4385 - RNA, 19 nt, Artificial Sequence
  Description of Artificial Sequence: Synthetic oligonucleotide
aggaaaagaaacguugaau

SEQ ID NO: 4386 - RNA, 19 nt, Artificial Sequence
  Description of Artificial Sequence: Synthetic oligonucleotide
aaggaaaagaaacguugaa

SEQ ID NO: 4387 - RNA, 19 nt, Artificial Sequence
  Description of Artificial Sequence: Synthetic oligonucleotide
gaaggaaaagaaacguuga

SEQ ID NO: 4388 - RNA, 19 nt, Artificial Sequence
  Description of Artificial Sequence: Synthetic oligonucleotide
agaaggaaaagaaacguug

SEQ ID NO: 4389 - RNA, 19 nt, Artificial Sequence
  Description of Artificial Sequence: Synthetic oligonucleotide
uagaaggaaaagaaacguu

SEQ ID NO: 4390 - RNA, 19 nt, Artificial Sequence
  Description of Artificial Sequence: Synthetic oligonucleotide
guagaaggaaaagaaacgu

SEQ ID NO: 4391 - RNA, 19 nt, Artificial Sequence
  Description of Artificial Sequence: Synthetic oligonucleotide
uguagaaggaaaagaaacg

SEQ ID NO: 4392 - RNA, 19 nt, Artificial Sequence
  Description of Artificial Sequence: Synthetic oligonucleotide
uuguagaaggaaaagaaac

SEQ ID NO: 4393 - RNA, 19 nt, Artificial Sequence
  Description of Artificial Sequence: Synthetic oligonucleotide
auuguagaaggaaaagaaa

SEQ ID NO: 4394 - RNA, 19 nt, Artificial Sequence
  Description of Artificial Sequence: Synthetic oligonucleotide
uauuguagaaggaaaagaa

SEQ ID NO: 4395 - RNA, 19 nt, Artificial Sequence
  Description of Artificial Sequence: Synthetic oligonucleotide
uuauuguagaaggaaaaga

SEQ ID NO: 4396 - RNA, 19 nt, Artificial Sequence
  Description of Artificial Sequence: Synthetic oligonucleotide
uuuauuguagaaggaaaag

SEQ ID NO: 4397 - RNA, 19 nt, Artificial Sequence
  Description of Artificial Sequence: Synthetic oligonucleotide
guuuauuguagaaggaaaa

SEQ ID NO: 4398 - RNA, 19 nt, Artificial Sequence
  Description of Artificial Sequence: Synthetic oligonucleotide
uguuuauuguagaaggaaa

SEQ ID NO: 4399 - RNA, 19 nt, Artificial Sequence
  Description of Artificial Sequence: Synthetic oligonucleotide
guguuuauuguagaaggaa

SEQ ID NO: 4400 - RNA, 19 nt, Artificial Sequence
  Description of Artificial Sequence: Synthetic oligonucleotide
aguguuuauuguagaagga

SEQ ID NO: 4401 - RNA, 19 nt, Artificial Sequence
  Description of Artificial Sequence: Synthetic oligonucleotide
aaguguuuauuguagaagg

SEQ ID NO: 4402 - RNA, 19 nt, Artificial Sequence
  Description of Artificial Sequence: Synthetic oligonucleotide
aaaguguuuauuguagaag

SEQ ID NO: 4403 - RNA, 19 nt, Artificial Sequence
  Description of Artificial Sequence: Synthetic oligonucleotide
gaaaguguuuauuguagaa

SEQ ID NO: 4404 - RNA, 19 nt, Artificial Sequence
  Description of Artificial Sequence: Synthetic oligonucleotide
ugaaaguguuuauuguaga

SEQ ID NO: 4405 - RNA, 19 nt, Artificial Sequence
  Description of Artificial Sequence: Synthetic oligonucleotide
uugaaaguguuuauuguag

SEQ ID NO: 4406 - RNA, 19 nt, Artificial Sequence
  Description of Artificial Sequence: Synthetic oligonucleotide
uuugaaaguguuuauugua

SEQ ID NO: 4407 - RNA, 19 nt, Artificial Sequence
  Description of Artificial Sequence: Synthetic oligonucleotide
uuuugaaaguguuuauugu

SEQ ID NO: 4408 - RNA, 19 nt, Artificial Sequence
  Description of Artificial Sequence: Synthetic oligonucleotide
auuuugaaaguguuuauug

SEQ ID NO: 4409 - RNA, 19 nt, Artificial Sequence
  Description of Artificial Sequence: Synthetic oligonucleotide
cauuuugaaaguguuuauu

SEQ ID NO: 4410 - RNA, 19 nt, Artificial Sequence
  Description of Artificial Sequence: Synthetic oligonucleotide
acauuuugaaaguguuuau

SEQ ID NO: 4411 - RNA, 19 nt, Artificial Sequence
  Description of Artificial Sequence: Synthetic oligonucleotide
cacauuuugaaaguguuua

SEQ ID NO: 4412 - RNA, 19 nt, Artificial Sequence
  Description of Artificial Sequence: Synthetic oligonucleotide
ucacauuuugaaaguguuu

SEQ ID NO: 4413 - DNA, 20 bp, Artificial Sequence
  Description of Artificial Sequence: Synthetic oligonucleotide
tcacattttgaaagtgttta

SEQ ID NO: 4414 - DNA, 20 bp, Artificial Sequence
  Description of Artificial Sequence: Synthetic oligonucleotide
cacattttgaaagtgtttat

SEQ ID NO: 4415 - DNA, 20 bp, Artificial Sequence
  Description of Artificial Sequence: Synthetic oligonucleotide
acattttgaaagtgtttatt

SEQ ID NO: 4416 - DNA, 20 bp, Artificial Sequence
  Description of Artificial Sequence: Synthetic oligonucleotide
cattttgaaagtgtttattg

SEQ ID NO: 4417 - DNA, 20 bp, Artificial Sequence
  Description of Artificial Sequence: Synthetic oligonucleotide
attttgaaagtgtttattgt

SEQ ID NO: 4418 - DNA, 20 bp, Artificial Sequence
  Description of Artificial Sequence: Synthetic oligonucleotide
ttttgaaagtgtttattgta

SEQ ID NO: 4419 - DNA, 20 bp, Artificial Sequence
  Description of Artificial Sequence: Synthetic oligonucleotide
tttgaaagtgtttattgtag

SEQ ID NO: 4420 - DNA, 20 bp, Artificial Sequence
  Description of Artificial Sequence: Synthetic oligonucleotide
ttgaaagtgtttattgtaga

SEQ ID NO: 4421 - DNA, 20 bp, Artificial Sequence
  Description of Artificial Sequence: Synthetic oligonucleotide
tgaaagtgtttattgtagaa

SEQ ID NO: 4422 - DNA, 20 bp, Artificial Sequence
  Description of Artificial Sequence: Synthetic oligonucleotide
gaaagtgtttattgtagaag

SEQ ID NO: 4423 - DNA, 20 bp, Artificial Sequence
  Description of Artificial Sequence: Synthetic oligonucleotide
aaagtgtttattgtagaagg

SEQ ID NO: 4424 - DNA, 20 bp, Artificial Sequence
  Description of Artificial Sequence: Synthetic oligonucleotide
aagtgtttattgtagaagga

SEQ ID NO: 4425 - DNA, 20 bp, Artificial Sequence
  Description of Artificial Sequence: Synthetic oligonucleotide
agtgtttattgtagaaggaa

SEQ ID NO: 4426 - DNA, 20 bp, Artificial Sequence
  Description of Artificial Sequence: Synthetic oligonucleotide
gtgtttattgtagaaggaaa

SEQ ID NO: 4427 - DNA, 20 bp, Artificial Sequence
  Description of Artificial Sequence: Synthetic oligonucleotide
tgtttattgtagaaggaaaa

SEQ ID NO: 4428 - DNA, 20 bp, Artificial Sequence
  Description of Artificial Sequence: Synthetic oligonucleotide
gtttattgtagaaggaaaag

SEQ ID NO: 4429 - DNA, 20 bp, Artificial Sequence
  Description of Artificial Sequence: Synthetic oligonucleotide
tttattgtagaaggaaaaga

SEQ ID NO: 4430 - DNA, 20 bp, Artificial Sequence
  Description of Artificial Sequence: Synthetic oligonucleotide
ttattgtagaaggaaaagaa

SEQ ID NO: 4431 - DNA, 20 bp, Artificial Sequence
  Description of Artificial Sequence: Synthetic oligonucleotide
tattgtagaaggaaaagaaa

SEQ ID NO: 4432 - DNA, 20 bp, Artificial Sequence
  Description of Artificial Sequence: Synthetic oligonucleotide
attgtagaaggaaaagaaac

SEQ ID NO: 4433 - DNA, 20 bp, Artificial Sequence
  Description of Artificial Sequence: Synthetic oligonucleotide
ttgtagaaggaaaagaaacg

SEQ ID NO: 4434 - DNA, 20 bp, Artificial Sequence
  Description of Artificial Sequence: Synthetic oligonucleotide
tgtagaaggaaaagaaacgt

SEQ ID NO: 4435 - DNA, 20 bp, Artificial Sequence
  Description of Artificial Sequence: Synthetic oligonucleotide
gtagaaggaaaagaaacgtt

SEQ ID NO: 4436 - DNA, 20 bp, Artificial Sequence
  Description of Artificial Sequence: Synthetic oligonucleotide
tagaaggaaaagaaacgttg

SEQ ID NO: 4437 - DNA, 20 bp, Artificial Sequence
  Description of Artificial Sequence: Synthetic oligonucleotide
agaaggaaaagaaacgttga

SEQ ID NO: 4438 - DNA, 20 bp, Artificial Sequence
  Description of Artificial Sequence: Synthetic oligonucleotide
gaaggaaaagaaacgttgaa

SEQ ID NO: 4439 - DNA, 20 bp, Artificial Sequence
  Description of Artificial Sequence: Synthetic oligonucleotide
aaggaaaagaaacgttgaat

SEQ ID NO: 4440 - DNA, 20 bp, Artificial Sequence
  Description of Artificial Sequence: Synthetic oligonucleotide
aggaaaagaaacgttgaatg

SEQ ID NO: 4441 - DNA, 20 bp, Artificial Sequence
  Description of Artificial Sequence: Synthetic oligonucleotide
ggaaaagaaacgttgaatgt

SEQ ID NO: 4442 - DNA, 20 bp, Artificial Sequence
  Description of Artificial Sequence: Synthetic oligonucleotide
gaaaagaaacgttgaatgtt

SEQ ID NO: 4443 - DNA, 20 bp, Artificial Sequence
  Description of Artificial Sequence: Synthetic oligonucleotide
aaaagaaacgttgaatgttt

SEQ ID NO: 4444 - DNA, 20 bp, Artificial Sequence
  Description of Artificial Sequence: Synthetic oligonucleotide
aaagaaacgttgaatgttta

SEQ ID NO: 4445 - DNA, 20 bp, Artificial Sequence
  Description of Artificial Sequence: Synthetic oligonucleotide
aagaaacgttgaatgtttaa

SEQ ID NO: 4446 - DNA, 20 bp, Artificial Sequence
  Description of Artificial Sequence: Synthetic oligonucleotide
agaaacgttgaatgtttaaa

SEQ ID NO: 4447 - DNA, 20 bp, Artificial Sequence
  Description of Artificial Sequence: Synthetic oligonucleotide
gaaacgttgaatgtttaaaa

SEQ ID NO: 4448 - DNA, 20 bp, Artificial Sequence
  Description of Artificial Sequence: Synthetic oligonucleotide
aaacgttgaatgtttaaaac

SEQ ID NO: 4449 - DNA, 20 bp, Artificial Sequence
  Description of Artificial Sequence: Synthetic oligonucleotide
aacgttgaatgtttaaaaca

SEQ ID NO: 4450 - DNA, 20 bp, Artificial Sequence
  Description of Artificial Sequence: Synthetic oligonucleotide
acgttgaatgtttaaaacaa

SEQ ID NO: 4451 - DNA, 20 bp, Artificial Sequence
  Description of Artificial Sequence: Synthetic oligonucleotide
cgttgaatgtttaaaacaaa

SEQ ID NO: 4452 - DNA, 20 bp, Artificial Sequence
  Description of Artificial Sequence: Synthetic oligonucleotide
gttgaatgtttaaaacaaaa

SEQ ID NO: 4453 - DNA, 20 bp, Artificial Sequence
  Description of Artificial Sequence: Synthetic oligonucleotide
ttgaatgtttaaaacaaaac

SEQ ID NO: 4454 - DNA, 20 bp, Artificial Sequence
  Description of Artificial Sequence: Synthetic oligonucleotide
tgaatgtttaaaacaaaacc

SEQ ID NO: 4455 - DNA, 20 bp, Artificial Sequence
  Description of Artificial Sequence: Synthetic oligonucleotide
gaatgtttaaaacaaaacca

SEQ ID NO: 4456 - DNA, 20 bp, Artificial Sequence
  Description of Artificial Sequence: Synthetic oligonucleotide
aatgtttaaaacaaaaccac

SEQ ID NO: 4457 - DNA, 20 bp, Artificial Sequence
  Description of Artificial Sequence: Synthetic oligonucleotide
atgtttaaaacaaaaccaca

SEQ ID NO: 4458 - DNA, 20 bp, Artificial Sequence
  Description of Artificial Sequence: Synthetic oligonucleotide
tgtttaaaacaaaaccacaa

SEQ ID NO: 4459 - DNA, 20 bp, Artificial Sequence
  Description of Artificial Sequence: Synthetic oligonucleotide
gtttaaaacaaaaccacaat

SEQ ID NO: 4460 - DNA, 20 bp, Artificial Sequence
  Description of Artificial Sequence: Synthetic oligonucleotide
tttaaaacaaaaccacaata

SEQ ID NO: 4461 - DNA, 20 bp, Artificial Sequence
  Description of Artificial Sequence: Synthetic oligonucleotide
ttaaaacaaaaccacaatat

SEQ ID NO: 4462 - DNA, 20 bp, Artificial Sequence
  Description of Artificial Sequence: Synthetic oligonucleotide
taaaacaaaaccacaatatt

SEQ ID NO: 4463 - DNA, 20 bp, Artificial Sequence
  Description of Artificial Sequence: Synthetic oligonucleotide
aaaacaaaaccacaatattt

SEQ ID NO: 4464 - DNA, 20 bp, Artificial Sequence
  Description of Artificial Sequence: Synthetic oligonucleotide
aaacaaaaccacaatatttt

SEQ ID NO: 4465 - DNA, 20 bp, Artificial Sequence
  Description of Artificial Sequence: Synthetic oligonucleotide
aacaaaaccacaatatttta

SEQ ID NO: 4466 - DNA, 20 bp, Artificial Sequence
  Description of Artificial Sequence: Synthetic oligonucleotide
acaaaaccacaatattttat

SEQ ID NO: 4467 - DNA, 20 bp, Artificial Sequence
  Description of Artificial Sequence: Synthetic oligonucleotide
caaaaccacaatattttatt

SEQ ID NO: 4468 - DNA, 20 bp, Artificial Sequence
  Description of Artificial Sequence: Synthetic oligonucleotide
aaaaccacaatattttattt

SEQ ID NO: 4469 - DNA, 20 bp, Artificial Sequence
  Description of Artificial Sequence: Synthetic oligonucleotide
aaaccacaatattttatttt

SEQ ID NO: 4470 - DNA, 20 bp, Artificial Sequence
  Description of Artificial Sequence: Synthetic oligonucleotide
aaccacaatattttattttt

SEQ ID NO: 4471 - DNA, 20 bp, Artificial Sequence
  Description of Artificial Sequence: Synthetic oligonucleotide
accacaatattttattttta

SEQ ID NO: 4472 - DNA, 20 bp, Artificial Sequence
  Description of Artificial Sequence: Synthetic oligonucleotide
ccacaatattttatttttac

SEQ ID NO: 4473 - DNA, 20 bp, Artificial Sequence
  Description of Artificial Sequence: Synthetic oligonucleotide
cacaatattttatttttaca

SEQ ID NO: 4474 - DNA, 20 bp, Artificial Sequence
  Description of Artificial Sequence: Synthetic oligonucleotide
acaatattttatttttacaa

SEQ ID NO: 4475 - DNA, 20 bp, Artificial Sequence
  Description of Artificial Sequence: Synthetic oligonucleotide
caatattttatttttacaaa

SEQ ID NO: 4476 - DNA, 20 bp, Artificial Sequence
  Description of Artificial Sequence: Synthetic oligonucleotide
aatattttatttttacaaag

SEQ ID NO: 4477 - DNA, 20 bp, Artificial Sequence
  Description of Artificial Sequence: Synthetic oligonucleotide
atattttatttttacaaagt

SEQ ID NO: 4478 - DNA, 20 bp, Artificial Sequence
  Description of Artificial Sequence: Synthetic oligonucleotide
tattttatttttacaaagtg

SEQ ID NO: 4479 - DNA, 20 bp, Artificial Sequence
  Description of Artificial Sequence: Synthetic oligonucleotide
attttatttttacaaagtga

SEQ ID NO: 4480 - DNA, 20 bp, Artificial Sequence
  Description of Artificial Sequence: Synthetic oligonucleotide
ttttatttttacaaagtgag

SEQ ID NO: 4481 - DNA, 20 bp, Artificial Sequence
  Description of Artificial Sequence: Synthetic oligonucleotide
tttatttttacaaagtgaga

SEQ ID NO: 4482 - DNA, 20 bp, Artificial Sequence
  Description of Artificial Sequence: Synthetic oligonucleotide
ttatttttacaaagtgagat

SEQ ID NO: 4483 - DNA, 20 bp, Artificial Sequence
  Description of Artificial Sequence: Synthetic oligonucleotide
tatttttacaaagtgagatg

SEQ ID NO: 4484 - DNA, 20 bp, Artificial Sequence
  Description of Artificial Sequence: Synthetic oligonucleotide
atttttacaaagtgagatgc

SEQ ID NO: 4485 - DNA, 20 bp, Artificial Sequence
  Description of Artificial Sequence: Synthetic oligonucleotide
tttttacaaagtgagatgct

SEQ ID NO: 4486 - DNA, 20 bp, Artificial Sequence
  Description of Artificial Sequence: Synthetic oligonucleotide
ttttacaaagtgagatgctt

SEQ ID NO: 4487 - DNA, 20 bp, Artificial Sequence
  Description of Artificial Sequence: Synthetic oligonucleotide
tttacaaagtgagatgctta

SEQ ID NO: 4488 - DNA, 20 bp, Artificial Sequence
  Description of Artificial Sequence: Synthetic oligonucleotide
ttacaaagtgagatgcttat

SEQ ID NO: 4489 - DNA, 20 bp, Artificial Sequence
  Description of Artificial Sequence: Synthetic oligonucleotide
tacaaagtgagatgcttatt

SEQ ID NO: 4490 - DNA, 20 bp, Artificial Sequence
  Description of Artificial Sequence: Synthetic oligonucleotide
acaaagtgagatgcttattt

SEQ ID NO: 4491 - DNA, 20 bp, Artificial Sequence
  Description of Artificial Sequence: Synthetic oligonucleotide
caaagtgagatgcttattta

SEQ ID NO: 4492 - DNA, 20 bp, Artificial Sequence
  Description of Artificial Sequence: Synthetic oligonucleotide
aaagtgagatgcttatttac

SEQ ID NO: 4493 - DNA, 20 bp, Artificial Sequence
  Description of Artificial Sequence: Synthetic oligonucleotide
aagtgagatgcttatttaca

SEQ ID NO: 4494 - DNA, 20 bp, Artificial Sequence
  Description of Artificial Sequence: Synthetic oligonucleotide
agtgagatgcttatttacag

SEQ ID NO: 4495 - DNA, 20 bp, Artificial Sequence
  Description of Artificial Sequence: Synthetic oligonucleotide
gtgagatgcttatttacagc

SEQ ID NO: 4496 - DNA, 20 bp, Artificial Sequence
  Description of Artificial Sequence: Synthetic oligonucleotide
tgagatgcttatttacagca

SEQ ID NO: 4497 - DNA, 20 bp, Artificial Sequence
  Description of Artificial Sequence: Synthetic oligonucleotide
gagatgcttatttacagcat

SEQ ID NO: 4498 - DNA, 20 bp, Artificial Sequence
  Description of Artificial Sequence: Synthetic oligonucleotide
agatgcttatttacagcatt

SEQ ID NO: 4499 - DNA, 20 bp, Artificial Sequence
  Description of Artificial Sequence: Synthetic oligonucleotide
gatgcttatttacagcattt

SEQ ID NO: 4500 - DNA, 20 bp, Artificial Sequence
  Description of Artificial Sequence: Synthetic oligonucleotide
atgcttatttacagcattta

SEQ ID NO: 4501 - DNA, 20 bp, Artificial Sequence
  Description of Artificial Sequence: Synthetic oligonucleotide
tgcttatttacagcatttat

SEQ ID NO: 4502 - DNA, 20 bp, Artificial Sequence
  Description of Artificial Sequence: Synthetic oligonucleotide
gcttatttacagcatttatt

SEQ ID NO: 4503 - DNA, 20 bp, Artificial Sequence
  Description of Artificial Sequence: Synthetic oligonucleotide
cttatttacagcatttatta

SEQ ID NO: 4504 - DNA, 20 bp, Artificial Sequence
  Description of Artificial Sequence: Synthetic oligonucleotide
ttatttacagcatttattat

SEQ ID NO: 4505 - DNA, 20 bp, Artificial Sequence
  Description of Artificial Sequence: Synthetic oligonucleotide
tatttacagcatttattatt

SEQ ID NO: 4506 - DNA, 20 bp, Artificial Sequence
  Description of Artificial Sequence: Synthetic oligonucleotide
atttacagcatttattatta

SEQ ID NO: 4507 - DNA, 20 bp, Artificial Sequence
  Description of Artificial Sequence: Synthetic oligonucleotide
tttacagcatttattattaa

SEQ ID NO: 4508 - DNA, 20 bp, Artificial Sequence
  Description of Artificial Sequence: Synthetic oligonucleotide
ttacagcatttattattaac

SEQ ID NO: 4509 - DNA, 20 bp, Artificial Sequence
  Description of Artificial Sequence: Synthetic oligonucleotide
tacagcatttattattaact

SEQ ID NO: 4510 - DNA, 20 bp, Artificial Sequence
  Description of Artificial Sequence: Synthetic oligonucleotide
acagcatttattattaacta

SEQ ID NO: 4511 - DNA, 20 bp, Artificial Sequence
  Description of Artificial Sequence: Synthetic oligonucleotide
cagcatttattattaactat

SEQ ID NO: 4512 - DNA, 20 bp, Artificial Sequence
  Description of Artificial Sequence: Synthetic oligonucleotide
agcatttattattaactata

SEQ ID NO: 4513 - DNA, 20 bp, Artificial Sequence
  Description of Artificial Sequence: Synthetic oligonucleotide
gcatttattattaactataa

SEQ ID NO: 4514 - DNA, 20 bp, Artificial Sequence
  Description of Artificial Sequence: Synthetic oligonucleotide
catttattattaactataac

SEQ ID NO: 4515 - DNA, 20 bp, Artificial Sequence
  Description of Artificial Sequence: Synthetic oligonucleotide
atttattattaactataaca

SEQ ID NO: 4516 - DNA, 20 bp, Artificial Sequence
  Description of Artificial Sequence: Synthetic oligonucleotide
tttattattaactataacac

SEQ ID NO: 4517 - DNA, 20 bp, Artificial Sequence
  Description of Artificial Sequence: Synthetic oligonucleotide
ttattattaactataacacc

SEQ ID NO: 4518 - DNA, 20 bp, Artificial Sequence
  Description of Artificial Sequence: Synthetic oligonucleotide
tattattaactataacacca

SEQ ID NO: 4519 - DNA, 20 bp, Artificial Sequence
  Description of Artificial Sequence: Synthetic oligonucleotide
attattaactataacaccat

SEQ ID NO: 4520 - DNA, 20 bp, Artificial Sequence
  Description of Artificial Sequence: Synthetic oligonucleotide
ttattaactataacaccatc

SEQ ID NO: 4521 - DNA, 20 bp, Artificial Sequence
  Description of Artificial Sequence: Synthetic oligonucleotide
tattaactataacaccatct

SEQ ID NO: 4522 - DNA, 20 bp, Artificial Sequence
  Description of Artificial Sequence: Synthetic oligonucleotide
attaactataacaccatcta

SEQ ID NO: 4523 - DNA, 20 bp, Artificial Sequence
  Description of Artificial Sequence: Synthetic oligonucleotide
ttaactataacaccatctac

SEQ ID NO: 4524 - DNA, 20 bp, Artificial Sequence
  Description of Artificial Sequence: Synthetic oligonucleotide
taactataacaccatctacc

SEQ ID NO: 4525 - DNA, 20 bp, Artificial Sequence
  Description of Artificial Sequence: Synthetic oligonucleotide
aactataacaccatctacct

SEQ ID NO: 4526 - DNA, 20 bp, Artificial Sequence
  Description of Artificial Sequence: Synthetic oligonucleotide
actataacaccatctacctt

SEQ ID NO: 4527 - DNA, 20 bp, Artificial Sequence
  Description of Artificial Sequence: Synthetic oligonucleotide
ctataacaccatctaccttc

SEQ ID NO: 4528 - DNA, 20 bp, Artificial Sequence
  Description of Artificial Sequence: Synthetic oligonucleotide
tataacaccatctaccttca

SEQ ID NO: 4529 - DNA, 20 bp, Artificial Sequence
  Description of Artificial Sequence: Synthetic oligonucleotide
ataacaccatctaccttcag

SEQ ID NO: 4530 - DNA, 20 bp, Artificial Sequence
  Description of Artificial Sequence: Synthetic oligonucleotide
taacaccatctaccttcagt

SEQ ID NO: 4531 - DNA, 20 bp, Artificial Sequence
  Description of Artificial Sequence: Synthetic oligonucleotide
aacaccatctaccttcagtt

SEQ ID NO: 4532 - DNA, 20 bp, Artificial Sequence
  Description of Artificial Sequence: Synthetic oligonucleotide
acaccatctaccttcagttt

SEQ ID NO: 4533 - DNA, 20 bp, Artificial Sequence
  Description of Artificial Sequence: Synthetic oligonucleotide
caccatctaccttcagtttt

SEQ ID NO: 4534 - DNA, 20 bp, Artificial Sequence
  Description of Artificial Sequence: Synthetic oligonucleotide
accatctaccttcagttttc

SEQ ID NO: 4535 - DNA, 20 bp, Artificial Sequence
  Description of Artificial Sequence: Synthetic oligonucleotide
ccatctaccttcagttttca

SEQ ID NO: 4536 - DNA, 20 bp, Artificial Sequence
  Description of Artificial Sequence: Synthetic oligonucleotide
catctaccttcagttttcaa

SEQ ID NO: 4537 - DNA, 20 bp, Artificial Sequence
  Description of Artificial Sequence: Synthetic oligonucleotide
atctaccttcagttttcaac

SEQ ID NO: 4538 - DNA, 20 bp, Artificial Sequence
  Description of Artificial Sequence: Synthetic oligonucleotide
tctaccttcagttttcaacc

SEQ ID NO: 4539 - DNA, 20 bp, Artificial Sequence
  Description of Artificial Sequence: Synthetic oligonucleotide
ctaccttcagttttcaacca

SEQ ID NO: 4540 - DNA, 20 bp, Artificial Sequence
  Description of Artificial Sequence: Synthetic oligonucleotide
taccttcagttttcaaccat

SEQ ID NO: 4541 - DNA, 20 bp, Artificial Sequence
  Description of Artificial Sequence: Synthetic oligonucleotide
accttcagttttcaaccatt

SEQ ID NO: 4542 - DNA, 20 bp, Artificial Sequence
  Description of Artificial Sequence: Synthetic oligonucleotide
ccttcagttttcaaccattt

SEQ ID NO: 4543 - DNA, 20 bp, Artificial Sequence
  Description of Artificial Sequence: Synthetic oligonucleotide
cttcagttttcaaccatttc

SEQ ID NO: 4544 - DNA, 20 bp, Artificial Sequence
  Description of Artificial Sequence: Synthetic oligonucleotide
ttcagttttcaaccatttcc

SEQ ID NO: 4545 - DNA, 20 bp, Artificial Sequence
  Description of Artificial Sequence: Synthetic oligonucleotide
tcagttttcaaccatttcct

SEQ ID NO: 4546 - DNA, 20 bp, Artificial Sequence
  Description of Artificial Sequence: Synthetic oligonucleotide
cagttttcaaccatttccta

SEQ ID NO: 4547 - DNA, 20 bp, Artificial Sequence
  Description of Artificial Sequence: Synthetic oligonucleotide
agttttcaaccatttcctac

SEQ ID NO: 4548 - DNA, 20 bp, Artificial Sequence
  Description of Artificial Sequence: Synthetic oligonucleotide
gttttcaaccatttcctaca

SEQ ID NO: 4549 - DNA, 20 bp, Artificial Sequence
  Description of Artificial Sequence: Synthetic oligonucleotide
ttttcaaccatttcctacag

SEQ ID NO: 4550 - DNA, 20 bp, Artificial Sequence
  Description of Artificial Sequence: Synthetic oligonucleotide
tttcaaccatttcctacaga

SEQ ID NO: 4551 - DNA, 20 bp, Artificial Sequence
  Description of Artificial Sequence: Synthetic oligonucleotide
ttcaaccatttcctacagac

SEQ ID NO: 4552 - DNA, 20 bp, Artificial Sequence
  Description of Artificial Sequence: Synthetic oligonucleotide
tcaaccatttcctacagaca

SEQ ID NO: 4553 - DNA, 20 bp, Artificial Sequence
  Description of Artificial Sequence: Synthetic oligonucleotide
caaccatttcctacagacaa

SEQ ID NO: 4554 - DNA, 20 bp, Artificial Sequence
  Description of Artificial Sequence: Synthetic oligonucleotide
aaccatttcctacagacaaa

SEQ ID NO: 4555 - DNA, 20 bp, Artificial Sequence
  Description of Artificial Sequence: Synthetic oligonucleotide
accatttcctacagacaaaa

SEQ ID NO: 4556 - DNA, 20 bp, Artificial Sequence
  Description of Artificial Sequence: Synthetic oligonucleotide
ccatttcctacagacaaaat

SEQ ID NO: 4557 - DNA, 20 bp, Artificial Sequence
  Description of Artificial Sequence: Synthetic oligonucleotide
catttcctacagacaaaatt

SEQ ID NO: 4558 - DNA, 20 bp, Artificial Sequence
  Description of Artificial Sequence: Synthetic oligonucleotide
atttcctacagacaaaattt

SEQ ID NO: 4559 - DNA, 20 bp, Artificial Sequence
  Description of Artificial Sequence: Synthetic oligonucleotide
tttcctacagacaaaattta

SEQ ID NO: 4560 - DNA, 20 bp, Artificial Sequence
  Description of Artificial Sequence: Synthetic oligonucleotide
ttcctacagacaaaatttaa

SEQ ID NO: 4561 - DNA, 20 bp, Artificial Sequence
  Description of Artificial Sequence: Synthetic oligonucleotide
tcctacagacaaaatttaaa

SEQ ID NO: 4562 - DNA, 20 bp, Artificial Sequence
  Description of Artificial Sequence: Synthetic oligonucleotide
cctacagacaaaatttaaaa

SEQ ID NO: 4563 - DNA, 20 bp, Artificial Sequence
  Description of Artificial Sequence: Synthetic oligonucleotide
ctacagacaaaatttaaaag

SEQ ID NO: 4564 - DNA, 20 bp, Artificial Sequence
  Description of Artificial Sequence: Synthetic oligonucleotide
tacagacaaaatttaaaagg

SEQ ID NO: 4565 - DNA, 20 bp, Artificial Sequence
  Description of Artificial Sequence: Synthetic oligonucleotide
acagacaaaatttaaaagga

SEQ ID NO: 4566 - DNA, 20 bp, Artificial Sequence
  Description of Artificial Sequence: Synthetic oligonucleotide
cagacaaaatttaaaaggaa

SEQ ID NO: 4567 - DNA, 20 bp, Artificial Sequence
  Description of Artificial Sequence: Synthetic oligonucleotide
agacaaaatttaaaaggaag

SEQ ID NO: 4568 - DNA, 20 bp, Artificial Sequence
  Description of Artificial Sequence: Synthetic oligonucleotide
gacaaaatttaaaaggaagc

SEQ ID NO: 4569 - DNA, 20 bp, Artificial Sequence
  Description of Artificial Sequence: Synthetic oligonucleotide
acaaaatttaaaaggaagct

SEQ ID NO: 4570 - DNA, 20 bp, Artificial Sequence
  Description of Artificial Sequence: Synthetic oligonucleotide
caaaatttaaaaggaagctc

SEQ ID NO: 4571 - DNA, 20 bp, Artificial Sequence
  Description of Artificial Sequence: Synthetic oligonucleotide
aaaatttaaaaggaagctcc

SEQ ID NO: 4572 - DNA, 20 bp, Artificial Sequence
  Description of Artificial Sequence: Synthetic oligonucleotide
aaatttaaaaggaagctcct

SEQ ID NO: 4573 - DNA, 20 bp, Artificial Sequence
  Description of Artificial Sequence: Synthetic oligonucleotide
aatttaaaaggaagctcctt

SEQ ID NO: 4574 - DNA, 20 bp, Artificial Sequence
  Description of Artificial Sequence: Synthetic oligonucleotide
atttaaaaggaagctccttg

SEQ ID NO: 4575 - DNA, 20 bp, Artificial Sequence
  Description of Artificial Sequence: Synthetic oligonucleotide
tttaaaaggaagctccttga

SEQ ID NO: 4576 - DNA, 20 bp, Artificial Sequence
  Description of Artificial Sequence: Synthetic oligonucleotide
ttaaaaggaagctccttgag

SEQ ID NO: 4577 - DNA, 20 bp, Artificial Sequence
  Description of Artificial Sequence: Synthetic oligonucleotide
taaaaggaagctccttgagc

SEQ ID NO: 4578 - DNA, 20 bp, Artificial Sequence
  Description of Artificial Sequence: Synthetic oligonucleotide
aaaaggaagctccttgagct

SEQ ID NO: 4579 - DNA, 20 bp, Artificial Sequence
  Description of Artificial Sequence: Synthetic oligonucleotide
aaaggaagctccttgagctt

SEQ ID NO: 4580 - DNA, 20 bp, Artificial Sequence
  Description of Artificial Sequence: Synthetic oligonucleotide
aaggaagctccttgagcttg

SEQ ID NO: 4581 - DNA, 20 bp, Artificial Sequence
  Description of Artificial Sequence: Synthetic oligonucleotide
aggaagctccttgagcttgt

SEQ ID NO: 4582 - DNA, 20 bp, Artificial Sequence
  Description of Artificial Sequence: Synthetic oligonucleotide
ggaagctccttgagcttgtt

SEQ ID NO: 4583 - DNA, 20 bp, Artificial Sequence
  Description of Artificial Sequence: Synthetic oligonucleotide
gaagctccttgagcttgttt

SEQ ID NO: 4584 - DNA, 20 bp, Artificial Sequence
  Description of Artificial Sequence: Synthetic oligonucleotide
aagctccttgagcttgtttc

SEQ ID NO: 4585 - DNA, 20 bp, Artificial Sequence
  Description of Artificial Sequence: Synthetic oligonucleotide
agctccttgagcttgtttct

SEQ ID NO: 4586 - DNA, 20 bp, Artificial Sequence
  Description of Artificial Sequence: Synthetic oligonucleotide
gctccttgagcttgtttctt

SEQ ID NO: 4587 - DNA, 20 bp, Artificial Sequence
  Description of Artificial Sequence: Synthetic oligonucleotide
ctccttgagcttgtttctta

SEQ ID NO: 4588 - DNA, 20 bp, Artificial Sequence
  Description of Artificial Sequence: Synthetic oligonucleotide
tccttgagcttgtttcttac

SEQ ID NO: 4589 - DNA, 20 bp, Artificial Sequence
  Description of Artificial Sequence: Synthetic oligonucleotide
ccttgagcttgtttcttaca

SEQ ID NO: 4590 - DNA, 20 bp, Artificial Sequence
  Description of Artificial Sequence: Synthetic oligonucleotide
cttgagcttgtttcttacaa

SEQ ID NO: 4591 - DNA, 20 bp, Artificial Sequence
  Description of Artificial Sequence: Synthetic oligonucleotide
ttgagcttgtttcttacaaa

SEQ ID NO: 4592 - DNA, 20 bp, Artificial Sequence
  Description of Artificial Sequence: Synthetic oligonucleotide
tgagcttgtttcttacaaag

SEQ ID NO: 4593 - DNA, 20 bp, Artificial Sequence
  Description of Artificial Sequence: Synthetic oligonucleotide
gagcttgtttcttacaaagt

SEQ ID NO: 4594 - DNA, 20 bp, Artificial Sequence
  Description of Artificial Sequence: Synthetic oligonucleotide
agcttgtttcttacaaagta

SEQ ID NO: 4595 - DNA, 20 bp, Artificial Sequence
  Description of Artificial Sequence: Synthetic oligonucleotide
gcttgtttcttacaaagtaa

SEQ ID NO: 4596 - DNA, 20 bp, Artificial Sequence
  Description of Artificial Sequence: Synthetic oligonucleotide
cttgtttcttacaaagtaaa

SEQ ID NO: 4597 - DNA, 20 bp, Artificial Sequence
  Description of Artificial Sequence: Synthetic oligonucleotide
ttgtttcttacaaagtaaat

SEQ ID NO: 4598 - DNA, 20 bp, Artificial Sequence
  Description of Artificial Sequence: Synthetic oligonucleotide
tgtttcttacaaagtaaata

SEQ ID NO: 4599 - DNA, 20 bp, Artificial Sequence
  Description of Artificial Sequence: Synthetic oligonucleotide
gtttcttacaaagtaaataa

SEQ ID NO: 4600 - DNA, 20 bp, Artificial Sequence
  Description of Artificial Sequence: Synthetic oligonucleotide
tttcttacaaagtaaataaa

SEQ ID NO: 4601 - DNA, 20 bp, Artificial Sequence
  Description of Artificial Sequence: Synthetic oligonucleotide
ttcttacaaagtaaataaaa

SEQ ID NO: 4602 - DNA, 20 bp, Artificial Sequence
  Description of Artificial Sequence: Synthetic oligonucleotide
tcttacaaagtaaataaaaa

SEQ ID NO: 4603 - DNA, 20 bp, Artificial Sequence
  Description of Artificial Sequence: Synthetic oligonucleotide
cttacaaagtaaataaaaat

SEQ ID NO: 4604 - DNA, 20 bp, Artificial Sequence
  Description of Artificial Sequence: Synthetic oligonucleotide
ttacaaagtaaataaaaata

SEQ ID NO: 4605 - DNA, 20 bp, Artificial Sequence
  Description of Artificial Sequence: Synthetic oligonucleotide
tacaaagtaaataaaaatag

SEQ ID NO: 4606 - DNA, 20 bp, Artificial Sequence
  Description of Artificial Sequence: Synthetic oligonucleotide
acaaagtaaataaaaataga

SEQ ID NO: 4607 - DNA, 20 bp, Artificial Sequence
  Description of Artificial Sequence: Synthetic oligonucleotide
caaagtaaataaaaatagat

SEQ ID NO: 4608 - DNA, 20 bp, Artificial Sequence
  Description of Artificial Sequence: Synthetic oligonucleotide
aaagtaaataaaaatagata

SEQ ID NO: 4609 - DNA, 20 bp, Artificial Sequence
  Description of Artificial Sequence: Synthetic oligonucleotide
aagtaaataaaaatagatat

SEQ ID NO: 4610 - DNA, 20 bp, Artificial Sequence
  Description of Artificial Sequence: Synthetic oligonucleotide
agtaaataaaaatagatata

SEQ ID NO: 4611 - DNA, 20 bp, Artificial Sequence
  Description of Artificial Sequence: Synthetic oligonucleotide
gtaaataaaaatagatatac

SEQ ID NO: 4612 - DNA, 20 bp, Artificial Sequence
  Description of Artificial Sequence: Synthetic oligonucleotide
taaataaaaatagatatacc

SEQ ID NO: 4613 - DNA, 20 bp, Artificial Sequence
  Description of Artificial Sequence: Synthetic oligonucleotide
aaataaaaatagatatacct

SEQ ID NO: 4614 - DNA, 20 bp, Artificial Sequence
  Description of Artificial Sequence: Synthetic oligonucleotide
aataaaaatagatatacctg

SEQ ID NO: 4615 - DNA, 20 bp, Artificial Sequence
  Description of Artificial Sequence: Synthetic oligonucleotide
ataaaaatagatatacctgt

SEQ ID NO: 4616 - DNA, 20 bp, Artificial Sequence
  Description of Artificial Sequence: Synthetic oligonucleotide
taaaaatagatatacctgta

SEQ ID NO: 4617 - DNA, 20 bp, Artificial Sequence
  Description of Artificial Sequence: Synthetic oligonucleotide
aaaaatagatatacctgtat

SEQ ID NO: 4618 - DNA, 20 bp, Artificial Sequence
  Description of Artificial Sequence: Synthetic oligonucleotide
aaaatagatatacctgtatt

SEQ ID NO: 4619 - DNA, 20 bp, Artificial Sequence
  Description of Artificial Sequence: Synthetic oligonucleotide
aaatagatatacctgtatta

SEQ ID NO: 4620 - DNA, 20 bp, Artificial Sequence
  Description of Artificial Sequence: Synthetic oligonucleotide
aatagatatacctgtattaa

SEQ ID NO: 4621 - DNA, 20 bp, Artificial Sequence
  Description of Artificial Sequence: Synthetic oligonucleotide
atagatatacctgtattaac

SEQ ID NO: 4622 - DNA, 20 bp, Artificial Sequence
  Description of Artificial Sequence: Synthetic oligonucleotide
tagatatacctgtattaact

SEQ ID NO: 4623 - DNA, 20 bp, Artificial Sequence
  Description of Artificial Sequence: Synthetic oligonucleotide
agatatacctgtattaacta

SEQ ID NO: 4624 - DNA, 20 bp, Artificial Sequence
  Description of Artificial Sequence: Synthetic oligonucleotide
gatatacctgtattaactat

SEQ ID NO: 4625 - DNA, 20 bp, Artificial Sequence
  Description of Artificial Sequence: Synthetic oligonucleotide
atatacctgtattaactatg

SEQ ID NO: 4626 - DNA, 20 bp, Artificial Sequence
  Description of Artificial Sequence: Synthetic oligonucleotide
tatacctgtattaactatga

SEQ ID NO: 4627 - DNA, 20 bp, Artificial Sequence
  Description of Artificial Sequence: Synthetic oligonucleotide
atacctgtattaactatgaa

SEQ ID NO: 4628 - DNA, 20 bp, Artificial Sequence
  Description of Artificial Sequence: Synthetic oligonucleotide
tacctgtattaactatgaat

SEQ ID NO: 4629 - DNA, 20 bp, Artificial Sequence
  Description of Artificial Sequence: Synthetic oligonucleotide
acctgtattaactatgaata

SEQ ID NO: 4630 - DNA, 20 bp, Artificial Sequence
  Description of Artificial Sequence: Synthetic oligonucleotide
cctgtattaactatgaatat

SEQ ID NO: 4631 - DNA, 20 bp, Artificial Sequence
  Description of Artificial Sequence: Synthetic oligonucleotide
ctgtattaactatgaatatt

SEQ ID NO: 4632 - DNA, 20 bp, Artificial Sequence
  Description of Artificial Sequence: Synthetic oligonucleotide
tgtattaactatgaatattt

SEQ ID NO: 4633 - DNA, 20 bp, Artificial Sequence
  Description of Artificial Sequence: Synthetic oligonucleotide
gtattaactatgaatatttt

SEQ ID NO: 4634 - DNA, 20 bp, Artificial Sequence
  Description of Artificial Sequence: Synthetic oligonucleotide
tattaactatgaatatttta

SEQ ID NO: 4635 - DNA, 20 bp, Artificial Sequence
  Description of Artificial Sequence: Synthetic oligonucleotide
attaactatgaatattttaa

SEQ ID NO: 4636 - DNA, 20 bp, Artificial Sequence
  Description of Artificial Sequence: Synthetic oligonucleotide
ttaactatgaatattttaag

SEQ ID NO: 4637 - DNA, 20 bp, Artificial Sequence
  Description of Artificial Sequence: Synthetic oligonucleotide
taactatgaatattttaagg

SEQ ID NO: 4638 - DNA, 20 bp, Artificial Sequence
  Description of Artificial Sequence: Synthetic oligonucleotide
aactatgaatattttaaggc

SEQ ID NO: 4639 - DNA, 20 bp, Artificial Sequence
  Description of Artificial Sequence: Synthetic oligonucleotide
actatgaatattttaaggca

SEQ ID NO: 4640 - DNA, 20 bp, Artificial Sequence
  Description of Artificial Sequence: Synthetic oligonucleotide
ctatgaatattttaaggcag

SEQ ID NO: 4641 - DNA, 20 bp, Artificial Sequence
  Description of Artificial Sequence: Synthetic oligonucleotide
tatgaatattttaaggcagt

SEQ ID NO: 4642 - DNA, 20 bp, Artificial Sequence
  Description of Artificial Sequence: Synthetic oligonucleotide
atgaatattttaaggcagtt

SEQ ID NO: 4643 - DNA, 20 bp, Artificial Sequence
  Description of Artificial Sequence: Synthetic oligonucleotide
tgaatattttaaggcagttt

SEQ ID NO: 4644 - DNA, 20 bp, Artificial Sequence
  Description of Artificial Sequence: Synthetic oligonucleotide
gaatattttaaggcagtttt

SEQ ID NO: 4645 - DNA, 20 bp, Artificial Sequence
  Description of Artificial Sequence: Synthetic oligonucleotide
aatattttaaggcagttttg

SEQ ID NO: 4646 - DNA, 20 bp, Artificial Sequence
  Description of Artificial Sequence: Synthetic oligonucleotide
atattttaaggcagttttgt

SEQ ID NO: 4647 - DNA, 20 bp, Artificial Sequence
  Description of Artificial Sequence: Synthetic oligonucleotide
tattttaaggcagttttgtg

SEQ ID NO: 4648 - DNA, 20 bp, Artificial Sequence
  Description of Artificial Sequence: Synthetic oligonucleotide
attttaaggcagttttgtgc

SEQ ID NO: 4649 - DNA, 20 bp, Artificial Sequence
  Description of Artificial Sequence: Synthetic oligonucleotide
ttttaaggcagttttgtgcc

SEQ ID NO: 4650 - DNA, 20 bp, Artificial Sequence
  Description of Artificial Sequence: Synthetic oligonucleotide
tttaaggcagttttgtgccg

SEQ ID NO: 4651 - DNA, 20 bp, Artificial Sequence
  Description of Artificial Sequence: Synthetic oligonucleotide
ttaaggcagttttgtgccgg

SEQ ID NO: 4652 - DNA, 20 bp, Artificial Sequence
  Description of Artificial Sequence: Synthetic oligonucleotide
taaggcagttttgtgccggc

SEQ ID NO: 4653 - DNA, 20 bp, Artificial Sequence
  Description of Artificial Sequence: Synthetic oligonucleotide
aaggcagttttgtgccggca

SEQ ID NO: 4654 - DNA, 20 bp, Artificial Sequence
  Description of Artificial Sequence: Synthetic oligonucleotide
aggcagttttgtgccggcat

SEQ ID NO: 4655 - DNA, 20 bp, Artificial Sequence
  Description of Artificial Sequence: Synthetic oligonucleotide
ggcagttttgtgccggcatc

SEQ ID NO: 4656 - DNA, 20 bp, Artificial Sequence
  Description of Artificial Sequence: Synthetic oligonucleotide
gcagttttgtgccggcatcc

SEQ ID NO: 4657 - DNA, 20 bp, Artificial Sequence
  Description of Artificial Sequence: Synthetic oligonucleotide
cagttttgtgccggcatcca

SEQ ID NO: 4658 - DNA, 20 bp, Artificial Sequence
  Description of Artificial Sequence: Synthetic oligonucleotide
agttttgtgccggcatccat

SEQ ID NO: 4659 - DNA, 20 bp, Artificial Sequence
  Description of Artificial Sequence: Synthetic oligonucleotide
gttttgtgccggcatccatg

SEQ ID NO: 4660 - DNA, 20 bp, Artificial Sequence
  Description of Artificial Sequence: Synthetic oligonucleotide
ttttgtgccggcatccatga

SEQ ID NO: 4661 - DNA, 20 bp, Artificial Sequence
  Description of Artificial Sequence: Synthetic oligonucleotide
tttgtgccggcatccatgag

SEQ ID NO: 4662 - DNA, 20 bp, Artificial Sequence
  Description of Artificial Sequence: Synthetic oligonucleotide
ttgtgccggcatccatgaga

SEQ ID NO: 4663 - DNA, 20 bp, Artificial Sequence
  Description of Artificial Sequence: Synthetic oligonucleotide
tgtgccggcatccatgagag

SEQ ID NO: 4664 - DNA, 20 bp, Artificial Sequence
  Description of Artificial Sequence: Synthetic oligonucleotide
gtgccggcatccatgagaga

SEQ ID NO: 4665 - DNA, 20 bp, Artificial Sequence
  Description of Artificial Sequence: Synthetic oligonucleotide
tgccggcatccatgagagac

SEQ ID NO: 4666 - DNA, 20 bp, Artificial Sequence
  Description of Artificial Sequence: Synthetic oligonucleotide
gccggcatccatgagagact

SEQ ID NO: 4667 - DNA, 20 bp, Artificial Sequence
  Description of Artificial Sequence: Synthetic oligonucleotide
ccggcatccatgagagactc

SEQ ID NO: 4668 - DNA, 20 bp, Artificial Sequence
  Description of Artificial Sequence: Synthetic oligonucleotide
cggcatccatgagagactct

SEQ ID NO: 4669 - DNA, 20 bp, Artificial Sequence
  Description of Artificial Sequence: Synthetic oligonucleotide
ggcatccatgagagactctg

SEQ ID NO: 4670 - DNA, 20 bp, Artificial Sequence
  Description of Artificial Sequence: Synthetic oligonucleotide
gcatccatgagagactctgt

SEQ ID NO: 4671 - DNA, 20 bp, Artificial Sequence
  Description of Artificial Sequence: Synthetic oligonucleotide
catccatgagagactctgtc

SEQ ID NO: 4672 - DNA, 20 bp, Artificial Sequence
  Description of Artificial Sequence: Synthetic oligonucleotide
atccatgagagactctgtcc

SEQ ID NO: 4673 - DNA, 20 bp, Artificial Sequence
  Description of Artificial Sequence: Synthetic oligonucleotide
tccatgagagactctgtcca

SEQ ID NO: 4674 - DNA, 20 bp, Artificial Sequence
  Description of Artificial Sequence: Synthetic oligonucleotide
ccatgagagactctgtccac

SEQ ID NO: 4675 - DNA, 20 bp, Artificial Sequence
  Description of Artificial Sequence: Synthetic oligonucleotide
catgagagactctgtccacc

SEQ ID NO: 4676 - DNA, 20 bp, Artificial Sequence
  Description of Artificial Sequence: Synthetic oligonucleotide
atgagagactctgtccacct

SEQ ID NO: 4677 - DNA, 20 bp, Artificial Sequence
  Description of Artificial Sequence: Synthetic oligonucleotide
tgagagactctgtccacctc

SEQ ID NO: 4678 - DNA, 20 bp, Artificial Sequence
  Description of Artificial Sequence: Synthetic oligonucleotide
gagagactctgtccacctcc

SEQ ID NO: 4679 - DNA, 20 bp, Artificial Sequence
  Description of Artificial Sequence: Synthetic oligonucleotide
agagactctgtccacctcct

SEQ ID NO: 4680 - DNA, 20 bp, Artificial Sequence
  Description of Artificial Sequence: Synthetic oligonucleotide
gagactctgtccacctcctg

SEQ ID NO: 4681 - DNA, 20 bp, Artificial Sequence
  Description of Artificial Sequence: Synthetic oligonucleotide
agactctgtccacctcctgc

SEQ ID NO: 4682 - DNA, 20 bp, Artificial Sequence
  Description of Artificial Sequence: Synthetic oligonucleotide
gactctgtccacctcctgct

SEQ ID NO: 4683 - DNA, 20 bp, Artificial Sequence
  Description of Artificial Sequence: Synthetic oligonucleotide
actctgtccacctcctgctg

SEQ ID NO: 4684 - DNA, 20 bp, Artificial Sequence
  Description of Artificial Sequence: Synthetic oligonucleotide
ctctgtccacctcctgctgg

SEQ ID NO: 4685 - DNA, 20 bp, Artificial Sequence
  Description of Artificial Sequence: Synthetic oligonucleotide
tctgtccacctcctgctggt

SEQ ID NO: 4686 - DNA, 20 bp, Artificial Sequence
  Description of Artificial Sequence: Synthetic oligonucleotide
ctgtccacctcctgctggtg

SEQ ID NO: 4687 - DNA, 20 bp, Artificial Sequence
  Description of Artificial Sequence: Synthetic oligonucleotide
tgtccacctcctgctggtgc

SEQ ID NO: 4688 - DNA, 20 bp, Artificial Sequence
  Description of Artificial Sequence: Synthetic oligonucleotide
gtccacctcctgctggtgct

SEQ ID NO: 4689 - DNA, 20 bp, Artificial Sequence
  Description of Artificial Sequence: Synthetic oligonucleotide
tccacctcctgctggtgctt

SEQ ID NO: 4690 - DNA, 20 bp, Artificial Sequence
  Description of Artificial Sequence: Synthetic oligonucleotide
ccacctcctgctggtgcttc

SEQ ID NO: 4691 - DNA, 20 bp, Artificial Sequence
  Description of Artificial Sequence: Synthetic oligonucleotide
cacctcctgctggtgcttca

SEQ ID NO: 4692 - DNA, 20 bp, Artificial Sequence
  Description of Artificial Sequence: Synthetic oligonucleotide
acctcctgctggtgcttcat

SEQ ID NO: 4693 - DNA, 20 bp, Artificial Sequence
  Description of Artificial Sequence: Synthetic oligonucleotide
cctcctgctggtgcttcatt

SEQ ID NO: 4694 - DNA, 20 bp, Artificial Sequence
  Description of Artificial Sequence: Synthetic oligonucleotide
ctcctgctggtgcttcattc

SEQ ID NO: 4695 - DNA, 20 bp, Artificial Sequence
  Description of Artificial Sequence: Synthetic oligonucleotide
tcctgctggtgcttcattcc

SEQ ID NO: 4696 - DNA, 20 bp, Artificial Sequence
  Description of Artificial Sequence: Synthetic oligonucleotide
cctgctggtgcttcattcct

SEQ ID NO: 4697 - DNA, 20 bp, Artificial Sequence
  Description of Artificial Sequence: Synthetic oligonucleotide
ctgctggtgcttcattcctt

SEQ ID NO: 4698 - DNA, 20 bp, Artificial Sequence
  Description of Artificial Sequence: Synthetic oligonucleotide
tgctggtgcttcattccttt

SEQ ID NO: 4699 - DNA, 20 bp, Artificial Sequence
  Description of Artificial Sequence: Synthetic oligonucleotide
gctggtgcttcattcctttc

SEQ ID NO: 4700 - DNA, 20 bp, Artificial Sequence
  Description of Artificial Sequence: Synthetic oligonucleotide
ctggtgcttcattcctttca

SEQ ID NO: 4701 - DNA, 20 bp, Artificial Sequence
  Description of Artificial Sequence: Synthetic oligonucleotide
tggtgcttcattcctttcag

SEQ ID NO: 4702 - DNA, 20 bp, Artificial Sequence
  Description of Artificial Sequence: Synthetic oligonucleotide
ggtgcttcattcctttcagt

SEQ ID NO: 4703 - DNA, 20 bp, Artificial Sequence
  Description of Artificial Sequence: Synthetic oligonucleotide
gtgcttcattcctttcagtg

SEQ ID NO: 4704 - DNA, 20 bp, Artificial Sequence
  Description of Artificial Sequence: Synthetic oligonucleotide
tgcttcattcctttcagtgc

SEQ ID NO: 4705 - DNA, 20 bp, Artificial Sequence
  Description of Artificial Sequence: Synthetic oligonucleotide
gcttcattcctttcagtgct

SEQ ID NO: 4706 - DNA, 20 bp, Artificial Sequence
  Description of Artificial Sequence: Synthetic oligonucleotide
cttcattcctttcagtgctg

SEQ ID NO: 4707 - DNA, 20 bp, Artificial Sequence
  Description of Artificial Sequence: Synthetic oligonucleotide
ttcattcctttcagtgctgt

SEQ ID NO: 4708 - DNA, 20 bp, Artificial Sequence
  Description of Artificial Sequence: Synthetic oligonucleotide
tcattcctttcagtgctgta

SEQ ID NO: 4709 - DNA, 20 bp, Artificial Sequence
  Description of Artificial Sequence: Synthetic oligonucleotide
cattcctttcagtgctgtac

SEQ ID NO: 4710 - DNA, 20 bp, Artificial Sequence
  Description of Artificial Sequence: Synthetic oligonucleotide
attcctttcagtgctgtaca

SEQ ID NO: 4711 - DNA, 20 bp, Artificial Sequence
  Description of Artificial Sequence: Synthetic oligonucleotide
ttcctttcagtgctgtacat

SEQ ID NO: 4712 - DNA, 20 bp, Artificial Sequence
  Description of Artificial Sequence: Synthetic oligonucleotide
tcctttcagtgctgtacatg

SEQ ID NO: 4713 - DNA, 20 bp, Artificial Sequence
  Description of Artificial Sequence: Synthetic oligonucleotide
cctttcagtgctgtacatga

SEQ ID NO: 4714 - DNA, 20 bp, Artificial Sequence
  Description of Artificial Sequence: Synthetic oligonucleotide
ctttcagtgctgtacatgac

SEQ ID NO: 4715 - DNA, 20 bp, Artificial Sequence
  Description of Artificial Sequence: Synthetic oligonucleotide
tttcagtgctgtacatgacc

SEQ ID NO: 4716 - DNA, 20 bp, Artificial Sequence
  Description of Artificial Sequence: Synthetic oligonucleotide
ttcagtgctgtacatgacca

SEQ ID NO: 4717 - DNA, 20 bp, Artificial Sequence
  Description of Artificial Sequence: Synthetic oligonucleotide
tcagtgctgtacatgaccaa

SEQ ID NO: 4718 - DNA, 20 bp, Artificial Sequence
  Description of Artificial Sequence: Synthetic oligonucleotide
cagtgctgtacatgaccaag

SEQ ID NO: 4719 - DNA, 20 bp, Artificial Sequence
  Description of Artificial Sequence: Synthetic oligonucleotide
agtgctgtacatgaccaagg

SEQ ID NO: 4720 - DNA, 20 bp, Artificial Sequence
  Description of Artificial Sequence: Synthetic oligonucleotide
gtgctgtacatgaccaaggc

SEQ ID NO: 4721 - DNA, 20 bp, Artificial Sequence
  Description of Artificial Sequence: Synthetic oligonucleotide
tgctgtacatgaccaaggcg

SEQ ID NO: 4722 - DNA, 20 bp, Artificial Sequence
  Description of Artificial Sequence: Synthetic oligonucleotide
gctgtacatgaccaaggcga

SEQ ID NO: 4723 - DNA, 20 bp, Artificial Sequence
  Description of Artificial Sequence: Synthetic oligonucleotide
ctgtacatgaccaaggcgag

SEQ ID NO: 4724 - DNA, 20 bp, Artificial Sequence
  Description of Artificial Sequence: Synthetic oligonucleotide
tgtacatgaccaaggcgagc

SEQ ID NO: 4725 - DNA, 20 bp, Artificial Sequence
  Description of Artificial Sequence: Synthetic oligonucleotide
gtacatgaccaaggcgagca

SEQ ID NO: 4726 - DNA, 20 bp, Artificial Sequence
  Description of Artificial Sequence: Synthetic oligonucleotide
tacatgaccaaggcgagcag

SEQ ID NO: 4727 - DNA, 20 bp, Artificial Sequence
  Description of Artificial Sequence: Synthetic oligonucleotide
acatgaccaaggcgagcagg

SEQ ID NO: 4728 - DNA, 20 bp, Artificial Sequence
  Description of Artificial Sequence: Synthetic oligonucleotide
catgaccaaggcgagcaggg

SEQ ID NO: 4729 - DNA, 20 bp, Artificial Sequence
  Description of Artificial Sequence: Synthetic oligonucleotide
atgaccaaggcgagcagggg

SEQ ID NO: 4730 - DNA, 20 bp, Artificial Sequence
  Description of Artificial Sequence: Synthetic oligonucleotide
tgaccaaggcgagcaggggc

SEQ ID NO: 4731 - DNA, 20 bp, Artificial Sequence
  Description of Artificial Sequence: Synthetic oligonucleotide
gaccaaggcgagcaggggca

SEQ ID NO: 4732 - DNA, 20 bp, Artificial Sequence
  Description of Artificial Sequence: Synthetic oligonucleotide
accaaggcgagcaggggcag

SEQ ID NO: 4733 - DNA, 20 bp, Artificial Sequence
  Description of Artificial Sequence: Synthetic oligonucleotide
ccaaggcgagcaggggcagt

SEQ ID NO: 4734 - DNA, 20 bp, Artificial Sequence
  Description of Artificial Sequence: Synthetic oligonucleotide
caaggcgagcaggggcagtg

SEQ ID NO: 4735 - DNA, 20 bp, Artificial Sequence
  Description of Artificial Sequence: Synthetic oligonucleotide
aaggcgagcaggggcagtgc

SEQ ID NO: 4736 - DNA, 20 bp, Artificial Sequence
  Description of Artificial Sequence: Synthetic oligonucleotide
aggcgagcaggggcagtgct

SEQ ID NO: 4737 - DNA, 20 bp, Artificial Sequence
  Description of Artificial Sequence: Synthetic oligonucleotide
ggcgagcaggggcagtgctc

SEQ ID NO: 4738 - DNA, 20 bp, Artificial Sequence
  Description of Artificial Sequence: Synthetic oligonucleotide
gcgagcaggggcagtgctca

SEQ ID NO: 4739 - DNA, 20 bp, Artificial Sequence
  Description of Artificial Sequence: Synthetic oligonucleotide
cgagcaggggcagtgctcag

SEQ ID NO: 4740 - DNA, 20 bp, Artificial Sequence
  Description of Artificial Sequence: Synthetic oligonucleotide
gagcaggggcagtgctcaga

SEQ ID NO: 4741 - DNA, 20 bp, Artificial Sequence
  Description of Artificial Sequence: Synthetic oligonucleotide
agcaggggcagtgctcagag

SEQ ID NO: 4742 - DNA, 20 bp, Artificial Sequence
  Description of Artificial Sequence: Synthetic oligonucleotide
gcaggggcagtgctcagagt

SEQ ID NO: 4743 - DNA, 20 bp, Artificial Sequence
  Description of Artificial Sequence: Synthetic oligonucleotide
caggggcagtgctcagagtc

SEQ ID NO: 4744 - DNA, 20 bp, Artificial Sequence
  Description of Artificial Sequence: Synthetic oligonucleotide
aggggcagtgctcagagtct

SEQ ID NO: 4745 - DNA, 20 bp, Artificial Sequence
  Description of Artificial Sequence: Synthetic oligonucleotide
ggggcagtgctcagagtctg

SEQ ID NO: 4746 - DNA, 20 bp, Artificial Sequence
  Description of Artificial Sequence: Synthetic oligonucleotide
gggcagtgctcagagtctga

SEQ ID NO: 4747 - DNA, 20 bp, Artificial Sequence
  Description of Artificial Sequence: Synthetic oligonucleotide
ggcagtgctcagagtctgat

SEQ ID NO: 4748 - DNA, 20 bp, Artificial Sequence
  Description of Artificial Sequence: Synthetic oligonucleotide
gcagtgctcagagtctgatc

SEQ ID NO: 4749 - DNA, 20 bp, Artificial Sequence
  Description of Artificial Sequence: Synthetic oligonucleotide
cagtgctcagagtctgatcg

SEQ ID NO: 4750 - DNA, 20 bp, Artificial Sequence
  Description of Artificial Sequence: Synthetic oligonucleotide
agtgctcagagtctgatcgc

SEQ ID NO: 4751 - DNA, 20 bp, Artificial Sequence
  Description of Artificial Sequence: Synthetic oligonucleotide
gtgctcagagtctgatcgcc

SEQ ID NO: 4752 - DNA, 20 bp, Artificial Sequence
  Description of Artificial Sequence: Synthetic oligonucleotide
tgctcagagtctgatcgcca

SEQ ID NO: 4753 - DNA, 20 bp, Artificial Sequence
  Description of Artificial Sequence: Synthetic oligonucleotide
gctcagagtctgatcgccag

SEQ ID NO: 4754 - DNA, 20 bp, Artificial Sequence
  Description of Artificial Sequence: Synthetic oligonucleotide
ctcagagtctgatcgccaga

SEQ ID NO: 4755 - DNA, 20 bp, Artificial Sequence
  Description of Artificial Sequence: Synthetic oligonucleotide
tcagagtctgatcgccagat

SEQ ID NO: 4756 - DNA, 20 bp, Artificial Sequence
  Description of Artificial Sequence: Synthetic oligonucleotide
cagagtctgatcgccagatg

SEQ ID NO: 4757 - DNA, 20 bp, Artificial Sequence
  Description of Artificial Sequence: Synthetic oligonucleotide
agagtctgatcgccagatgc

SEQ ID NO: 4758 - DNA, 20 bp, Artificial Sequence
  Description of Artificial Sequence: Synthetic oligonucleotide
gagtctgatcgccagatgca

SEQ ID NO: 4759 - DNA, 20 bp, Artificial Sequence
  Description of Artificial Sequence: Synthetic oligonucleotide
agtctgatcgccagatgcag

SEQ ID NO: 4760 - DNA, 20 bp, Artificial Sequence
  Description of Artificial Sequence: Synthetic oligonucleotide
gtctgatcgccagatgcagt

SEQ ID NO: 4761 - DNA, 20 bp, Artificial Sequence
  Description of Artificial Sequence: Synthetic oligonucleotide
tctgatcgccagatgcagtg

SEQ ID NO: 4762 - DNA, 20 bp, Artificial Sequence
  Description of Artificial Sequence: Synthetic oligonucleotide
ctgatcgccagatgcagtgc

SEQ ID NO: 4763 - DNA, 20 bp, Artificial Sequence
  Description of Artificial Sequence: Synthetic oligonucleotide
tgatcgccagatgcagtgcc

SEQ ID NO: 4764 - DNA, 20 bp, Artificial Sequence
  Description of Artificial Sequence: Synthetic oligonucleotide
gatcgccagatgcagtgccc

SEQ ID NO: 4765 - DNA, 20 bp, Artificial Sequence
  Description of Artificial Sequence: Synthetic oligonucleotide
atcgccagatgcagtgccct

SEQ ID NO: 4766 - DNA, 20 bp, Artificial Sequence
  Description of Artificial Sequence: Synthetic oligonucleotide
tcgccagatgcagtgccctg

SEQ ID NO: 4767 - DNA, 20 bp, Artificial Sequence
  Description of Artificial Sequence: Synthetic oligonucleotide
cgccagatgcagtgccctgg

SEQ ID NO: 4768 - DNA, 20 bp, Artificial Sequence
  Description of Artificial Sequence: Synthetic oligonucleotide
gccagatgcagtgccctgga

SEQ ID NO: 4769 - DNA, 20 bp, Artificial Sequence
  Description of Artificial Sequence: Synthetic oligonucleotide
ccagatgcagtgccctggag

SEQ ID NO: 4770 - DNA, 20 bp, Artificial Sequence
  Description of Artificial Sequence: Synthetic oligonucleotide
cagatgcagtgccctggagt

SEQ ID NO: 4771 - DNA, 20 bp, Artificial Sequence
  Description of Artificial Sequence: Synthetic oligonucleotide
agatgcagtgccctggagtt

SEQ ID NO: 4772 - DNA, 20 bp, Artificial Sequence
  Description of Artificial Sequence: Synthetic oligonucleotide
gatgcagtgccctggagttt

SEQ ID NO: 4773 - DNA, 20 bp, Artificial Sequence
  Description of Artificial Sequence: Synthetic oligonucleotide
atgcagtgccctggagtttc

SEQ ID NO: 4774 - DNA, 20 bp, Artificial Sequence
  Description of Artificial Sequence: Synthetic oligonucleotide
tgcagtgccctggagtttcc

SEQ ID NO: 4775 - DNA, 20 bp, Artificial Sequence
  Description of Artificial Sequence: Synthetic oligonucleotide
gcagtgccctggagtttcct

SEQ ID NO: 4776 - DNA, 20 bp, Artificial Sequence
  Description of Artificial Sequence: Synthetic oligonucleotide
cagtgccctggagtttcctc

SEQ ID NO: 4777 - DNA, 20 bp, Artificial Sequence
  Description of Artificial Sequence: Synthetic oligonucleotide
agtgccctggagtttcctcc

SEQ ID NO: 4778 - DNA, 20 bp, Artificial Sequence
  Description of Artificial Sequence: Synthetic oligonucleotide
gtgccctggagtttcctccc

SEQ ID NO: 4779 - DNA, 20 bp, Artificial Sequence
  Description of Artificial Sequence: Synthetic oligonucleotide
tgccctggagtttcctcccc

SEQ ID NO: 4780 - DNA, 20 bp, Artificial Sequence
  Description of Artificial Sequence: Synthetic oligonucleotide
gccctggagtttcctccccg

SEQ ID NO: 4781 - DNA, 20 bp, Artificial Sequence
  Description of Artificial Sequence: Synthetic oligonucleotide
ccctggagtttcctccccgc

SEQ ID NO: 4782 - DNA, 20 bp, Artificial Sequence
  Description of Artificial Sequence: Synthetic oligonucleotide
cctggagtttcctccccgca

SEQ ID NO: 4783 - DNA, 20 bp, Artificial Sequence
  Description of Artificial Sequence: Synthetic oligonucleotide
ctggagtttcctccccgcaa

SEQ ID NO: 4784 - DNA, 20 bp, Artificial Sequence
  Description of Artificial Sequence: Synthetic oligonucleotide
tggagtttcctccccgcaag

SEQ ID NO: 4785 - DNA, 20 bp, Artificial Sequence
  Description of Artificial Sequence: Synthetic oligonucleotide
ggagtttcctccccgcaagt

SEQ ID NO: 4786 - DNA, 20 bp, Artificial Sequence
  Description of Artificial Sequence: Synthetic oligonucleotide
gagtttcctccccgcaagtc

SEQ ID NO: 4787 - DNA, 20 bp, Artificial Sequence
  Description of Artificial Sequence: Synthetic oligonucleotide
agtttcctccccgcaagtcc

SEQ ID NO: 4788 - DNA, 20 bp, Artificial Sequence
  Description of Artificial Sequence: Synthetic oligonucleotide
gtttcctccccgcaagtcca

SEQ ID NO: 4789 - DNA, 20 bp, Artificial Sequence
  Description of Artificial Sequence: Synthetic oligonucleotide
tttcctccccgcaagtccag

SEQ ID NO: 4790 - DNA, 20 bp, Artificial Sequence
  Description of Artificial Sequence: Synthetic oligonucleotide
ttcctccccgcaagtccagc

SEQ ID NO: 4791 - DNA, 20 bp, Artificial Sequence
  Description of Artificial Sequence: Synthetic oligonucleotide
tcctccccgcaagtccagcc

SEQ ID NO: 4792 - DNA, 20 bp, Artificial Sequence
  Description of Artificial Sequence: Synthetic oligonucleotide
cctccccgcaagtccagcct

SEQ ID NO: 4793 - DNA, 20 bp, Artificial Sequence
  Description of Artificial Sequence: Synthetic oligonucleotide
ctccccgcaagtccagcctg

SEQ ID NO: 4794 - DNA, 20 bp, Artificial Sequence
  Description of Artificial Sequence: Synthetic oligonucleotide
tccccgcaagtccagcctgg

SEQ ID NO: 4795 - DNA, 20 bp, Artificial Sequence
  Description of Artificial Sequence: Synthetic oligonucleotide
ccccgcaagtccagcctggg

SEQ ID NO: 4796 - DNA, 20 bp, Artificial Sequence
  Description of Artificial Sequence: Synthetic oligonucleotide
cccgcaagtccagcctgggt

SEQ ID NO: 4797 - DNA, 20 bp, Artificial Sequence
  Description of Artificial Sequence: Synthetic oligonucleotide
ccgcaagtccagcctgggtc

SEQ ID NO: 4798 - DNA, 20 bp, Artificial Sequence
  Description of Artificial Sequence: Synthetic oligonucleotide
cgcaagtccagcctgggtca

SEQ ID NO: 4799 - DNA, 20 bp, Artificial Sequence
  Description of Artificial Sequence: Synthetic oligonucleotide
gcaagtccagcctgggtcag

SEQ ID NO: 4800 - DNA, 20 bp, Artificial Sequence
  Description of Artificial Sequence: Synthetic oligonucleotide
caagtccagcctgggtcagt

SEQ ID NO: 4801 - DNA, 20 bp, Artificial Sequence
  Description of Artificial Sequence: Synthetic oligonucleotide
aagtccagcctgggtcagtt

SEQ ID NO: 4802 - DNA, 20 bp, Artificial Sequence
  Description of Artificial Sequence: Synthetic oligonucleotide
agtccagcctgggtcagttc

SEQ ID NO: 4803 - DNA, 20 bp, Artificial Sequence
  Description of Artificial Sequence: Synthetic oligonucleotide
gtccagcctgggtcagttcc

SEQ ID NO: 4804 - DNA, 20 bp, Artificial Sequence
  Description of Artificial Sequence: Synthetic oligonucleotide
tccagcctgggtcagttcca

SEQ ID NO: 4805 - DNA, 20 bp, Artificial Sequence
  Description of Artificial Sequence: Synthetic oligonucleotide
ccagcctgggtcagttccag

SEQ ID NO: 4806 - DNA, 20 bp, Artificial Sequence
  Description of Artificial Sequence: Synthetic oligonucleotide
cagcctgggtcagttccagc

SEQ ID NO: 4807 - DNA, 20 bp, Artificial Sequence
  Description of Artificial Sequence: Synthetic oligonucleotide
agcctgggtcagttccagcc

SEQ ID NO: 4808 - DNA, 20 bp, Artificial Sequence
  Description of Artificial Sequence: Synthetic oligonucleotide
gcctgggtcagttccagccg

SEQ ID NO: 4809 - DNA, 20 bp, Artificial Sequence
  Description of Artificial Sequence: Synthetic oligonucleotide
cctgggtcagttccagccga

SEQ ID NO: 4810 - DNA, 20 bp, Artificial Sequence
  Description of Artificial Sequence: Synthetic oligonucleotide
ctgggtcagttccagccgaa

SEQ ID NO: 4811 - DNA, 20 bp, Artificial Sequence
  Description of Artificial Sequence: Synthetic oligonucleotide
tgggtcagttccagccgaac

SEQ ID NO: 4812 - DNA, 20 bp, Artificial Sequence
  Description of Artificial Sequence: Synthetic oligonucleotide
gggtcagttccagccgaaca

SEQ ID NO: 4813 - DNA, 20 bp, Artificial Sequence
  Description of Artificial Sequence: Synthetic oligonucleotide
ggtcagttccagccgaacaa

SEQ ID NO: 4814 - DNA, 20 bp, Artificial Sequence
  Description of Artificial Sequence: Synthetic oligonucleotide
gtcagttccagccgaacaat

SEQ ID NO: 4815 - DNA, 20 bp, Artificial Sequence
  Description of Artificial Sequence: Synthetic oligonucleotide
tcagttccagccgaacaatt

SEQ ID NO: 4816 - DNA, 20 bp, Artificial Sequence
  Description of Artificial Sequence: Synthetic oligonucleotide
cagttccagccgaacaattt

SEQ ID NO: 4817 - DNA, 20 bp, Artificial Sequence
  Description of Artificial Sequence: Synthetic oligonucleotide
agttccagccgaacaatttt

SEQ ID NO: 4818 - DNA, 20 bp, Artificial Sequence
  Description of Artificial Sequence: Synthetic oligonucleotide
gttccagccgaacaattttt

SEQ ID NO: 4819 - DNA, 20 bp, Artificial Sequence
  Description of Artificial Sequence: Synthetic oligonucleotide
ttccagccgaacaatttttg

SEQ ID NO: 4820 - DNA, 20 bp, Artificial Sequence
  Description of Artificial Sequence: Synthetic oligonucleotide
tccagccgaacaatttttgt

SEQ ID NO: 4821 - DNA, 20 bp, Artificial Sequence
  Description of Artificial Sequence: Synthetic oligonucleotide
ccagccgaacaatttttgtg

SEQ ID NO: 4822 - DNA, 20 bp, Artificial Sequence
  Description of Artificial Sequence: Synthetic oligonucleotide
cagccgaacaatttttgtgt

SEQ ID NO: 4823 - DNA, 20 bp, Artificial Sequence
  Description of Artificial Sequence: Synthetic oligonucleotide
agccgaacaatttttgtgtt

SEQ ID NO: 4824 - DNA, 20 bp, Artificial Sequence
  Description of Artificial Sequence: Synthetic oligonucleotide
gccgaacaatttttgtgttt

SEQ ID NO: 4825 - DNA, 20 bp, Artificial Sequence
  Description of Artificial Sequence: Synthetic oligonucleotide
ccgaacaatttttgtgtttt

SEQ ID NO: 4826 - DNA, 20 bp, Artificial Sequence
  Description of Artificial Sequence: Synthetic oligonucleotide
cgaacaatttttgtgtttta

SEQ ID NO: 4827 - DNA, 20 bp, Artificial Sequence
  Description of Artificial Sequence: Synthetic oligonucleotide
gaacaatttttgtgttttaa

SEQ ID NO: 4828 - DNA, 20 bp, Artificial Sequence
  Description of Artificial Sequence: Synthetic oligonucleotide
aacaatttttgtgttttaaa

SEQ ID NO: 4829 - DNA, 20 bp, Artificial Sequence
  Description of Artificial Sequence: Synthetic oligonucleotide
acaatttttgtgttttaaaa

SEQ ID NO: 4830 - DNA, 20 bp, Artificial Sequence
  Description of Artificial Sequence: Synthetic oligonucleotide
caatttttgtgttttaaaaa

SEQ ID NO: 4831 - DNA, 20 bp, Artificial Sequence
  Description of Artificial Sequence: Synthetic oligonucleotide
aatttttgtgttttaaaaat

SEQ ID NO: 4832 - DNA, 20 bp, Artificial Sequence
  Description of Artificial Sequence: Synthetic oligonucleotide
atttttgtgttttaaaaata

SEQ ID NO: 4833 - DNA, 20 bp, Artificial Sequence
  Description of Artificial Sequence: Synthetic oligonucleotide
tttttgtgttttaaaaataa

SEQ ID NO: 4834 - DNA, 20 bp, Artificial Sequence
  Description of Artificial Sequence: Synthetic oligonucleotide
ttttgtgttttaaaaataat

SEQ ID NO: 4835 - DNA, 20 bp, Artificial Sequence
  Description of Artificial Sequence: Synthetic oligonucleotide
tttgtgttttaaaaataatg

SEQ ID NO: 4836 - DNA, 20 bp, Artificial Sequence
  Description of Artificial Sequence: Synthetic oligonucleotide
ttgtgttttaaaaataatgt

SEQ ID NO: 4837 - DNA, 20 bp, Artificial Sequence
  Description of Artificial Sequence: Synthetic oligonucleotide
tgtgttttaaaaataatgtg

SEQ ID NO: 4838 - DNA, 20 bp, Artificial Sequence
  Description of Artificial Sequence: Synthetic oligonucleotide
gtgttttaaaaataatgtgt

SEQ ID NO: 4839 - DNA, 20 bp, Artificial Sequence
  Description of Artificial Sequence: Synthetic oligonucleotide
tgttttaaaaataatgtgta

SEQ ID NO: 4840 - DNA, 20 bp, Artificial Sequence
  Description of Artificial Sequence: Synthetic oligonucleotide
gttttaaaaataatgtgtag

SEQ ID NO: 4841 - DNA, 20 bp, Artificial Sequence
  Description of Artificial Sequence: Synthetic oligonucleotide
ttttaaaaataatgtgtaga

SEQ ID NO: 4842 - DNA, 20 bp, Artificial Sequence
  Description of Artificial Sequence: Synthetic oligonucleotide
tttaaaaataatgtgtagac

SEQ ID NO: 4843 - DNA, 20 bp, Artificial Sequence
  Description of Artificial Sequence: Synthetic oligonucleotide
ttaaaaataatgtgtagact

SEQ ID NO: 4844 - DNA, 20 bp, Artificial Sequence
  Description of Artificial Sequence: Synthetic oligonucleotide
taaaaataatgtgtagactc

SEQ ID NO: 4845 - DNA, 20 bp, Artificial Sequence
  Description of Artificial Sequence: Synthetic oligonucleotide
aaaaataatgtgtagactca

SEQ ID NO: 4846 - DNA, 20 bp, Artificial Sequence
  Description of Artificial Sequence: Synthetic oligonucleotide
aaaataatgtgtagactcaa

SEQ ID NO: 4847 - DNA, 20 bp, Artificial Sequence
  Description of Artificial Sequence: Synthetic oligonucleotide
aaataatgtgtagactcaag

SEQ ID NO: 4848 - DNA, 20 bp, Artificial Sequence
  Description of Artificial Sequence: Synthetic oligonucleotide
aataatgtgtagactcaaga

SEQ ID NO: 4849 - DNA, 20 bp, Artificial Sequence
  Description of Artificial Sequence: Synthetic oligonucleotide
ataatgtgtagactcaagat

SEQ ID NO: 4850 - DNA, 20 bp, Artificial Sequence
  Description of Artificial Sequence: Synthetic oligonucleotide
taatgtgtagactcaagata

SEQ ID NO: 4851 - DNA, 20 bp, Artificial Sequence
  Description of Artificial Sequence: Synthetic oligonucleotide
aatgtgtagactcaagataa

SEQ ID NO: 4852 - DNA, 20 bp, Artificial Sequence
  Description of Artificial Sequence: Synthetic oligonucleotide
atgtgtagactcaagataat

SEQ ID NO: 4853 - DNA, 20 bp, Artificial Sequence
  Description of Artificial Sequence: Synthetic oligonucleotide
tgtgtagactcaagataatt

SEQ ID NO: 4854 - DNA, 20 bp, Artificial Sequence
  Description of Artificial Sequence: Synthetic oligonucleotide
gtgtagactcaagataattt

SEQ ID NO: 4855 - DNA, 20 bp, Artificial Sequence
  Description of Artificial Sequence: Synthetic oligonucleotide
tgtagactcaagataatttc

SEQ ID NO: 4856 - DNA, 20 bp, Artificial Sequence
  Description of Artificial Sequence: Synthetic oligonucleotide
gtagactcaagataatttca

SEQ ID NO: 4857 - DNA, 20 bp, Artificial Sequence
  Description of Artificial Sequence: Synthetic oligonucleotide
tagactcaagataatttcac

SEQ ID NO: 4858 - DNA, 20 bp, Artificial Sequence
  Description of Artificial Sequence: Synthetic oligonucleotide
agactcaagataatttcact

SEQ ID NO: 4859 - DNA, 20 bp, Artificial Sequence
  Description of Artificial Sequence: Synthetic oligonucleotide
gactcaagataatttcactg

SEQ ID NO: 4860 - DNA, 20 bp, Artificial Sequence
  Description of Artificial Sequence: Synthetic oligonucleotide
actcaagataatttcactgg

SEQ ID NO: 4861 - DNA, 20 bp, Artificial Sequence
  Description of Artificial Sequence: Synthetic oligonucleotide
ctcaagataatttcactgga

SEQ ID NO: 4862 - DNA, 20 bp, Artificial Sequence
  Description of Artificial Sequence: Synthetic oligonucleotide
tcaagataatttcactggat

SEQ ID NO: 4863 - DNA, 20 bp, Artificial Sequence
  Description of Artificial Sequence: Synthetic oligonucleotide
caagataatttcactggatt

SEQ ID NO: 4864 - DNA, 20 bp, Artificial Sequence
  Description of Artificial Sequence: Synthetic oligonucleotide
aagataatttcactggattt

SEQ ID NO: 4865 - DNA, 20 bp, Artificial Sequence
  Description of Artificial Sequence: Synthetic oligonucleotide
agataatttcactggattta

SEQ ID NO: 4866 - DNA, 20 bp, Artificial Sequence
  Description of Artificial Sequence: Synthetic oligonucleotide
gataatttcactggatttaa

SEQ ID NO: 4867 - DNA, 20 bp, Artificial Sequence
  Description of Artificial Sequence: Synthetic oligonucleotide
ataatttcactggatttaaa

SEQ ID NO: 4868 - DNA, 20 bp, Artificial Sequence
  Description of Artificial Sequence: Synthetic oligonucleotide
taatttcactggatttaaaa

SEQ ID NO: 4869 - DNA, 20 bp, Artificial Sequence
  Description of Artificial Sequence: Synthetic oligonucleotide
aatttcactggatttaaaaa

SEQ ID NO: 4870 - DNA, 20 bp, Artificial Sequence
  Description of Artificial Sequence: Synthetic oligonucleotide
atttcactggatttaaaaat

SEQ ID NO: 4871 - DNA, 20 bp, Artificial Sequence
  Description of Artificial Sequence: Synthetic oligonucleotide
tttcactggatttaaaaata

SEQ ID NO: 4872 - DNA, 20 bp, Artificial Sequence
  Description of Artificial Sequence: Synthetic oligonucleotide
ttcactggatttaaaaatag

SEQ ID NO: 4873 - DNA, 20 bp, Artificial Sequence
  Description of Artificial Sequence: Synthetic oligonucleotide
tcactggatttaaaaataga

SEQ ID NO: 4874 - DNA, 20 bp, Artificial Sequence
  Description of Artificial Sequence: Synthetic oligonucleotide
cactggatttaaaaatagaa

SEQ ID NO: 4875 - DNA, 20 bp, Artificial Sequence
  Description of Artificial Sequence: Synthetic oligonucleotide
actggatttaaaaatagaaa

SEQ ID NO: 4876 - DNA, 20 bp, Artificial Sequence
  Description of Artificial Sequence: Synthetic oligonucleotide
ctggatttaaaaatagaaat

SEQ ID NO: 4877 - DNA, 20 bp, Artificial Sequence
  Description of Artificial Sequence: Synthetic oligonucleotide
tggatttaaaaatagaaata

SEQ ID NO: 4878 - DNA, 20 bp, Artificial Sequence
  Description of Artificial Sequence: Synthetic oligonucleotide
ggatttaaaaatagaaatac

SEQ ID NO: 4879 - DNA, 20 bp, Artificial Sequence
  Description of Artificial Sequence: Synthetic oligonucleotide
gatttaaaaatagaaatacc

SEQ ID NO: 4880 - DNA, 20 bp, Artificial Sequence
  Description of Artificial Sequence: Synthetic oligonucleotide
atttaaaaatagaaatacca

SEQ ID NO: 4881 - DNA, 20 bp, Artificial Sequence
  Description of Artificial Sequence: Synthetic oligonucleotide
tttaaaaatagaaataccat

SEQ ID NO: 4882 - DNA, 20 bp, Artificial Sequence
  Description of Artificial Sequence: Synthetic oligonucleotide
ttaaaaatagaaataccatt

SEQ ID NO: 4883 - DNA, 20 bp, Artificial Sequence
  Description of Artificial Sequence: Synthetic oligonucleotide
taaaaatagaaataccattt

SEQ ID NO: 4884 - DNA, 20 bp, Artificial Sequence
  Description of Artificial Sequence: Synthetic oligonucleotide
aaaaatagaaataccatttc

SEQ ID NO: 4885 - DNA, 20 bp, Artificial Sequence
  Description of Artificial Sequence: Synthetic oligonucleotide
aaaatagaaataccatttcc

SEQ ID NO: 4886 - DNA, 20 bp, Artificial Sequence
  Description of Artificial Sequence: Synthetic oligonucleotide
aaatagaaataccatttccc

SEQ ID NO: 4887 - DNA, 20 bp, Artificial Sequence
  Description of Artificial Sequence: Synthetic oligonucleotide
aatagaaataccatttccca

SEQ ID NO: 4888 - DNA, 20 bp, Artificial Sequence
  Description of Artificial Sequence: Synthetic oligonucleotide
atagaaataccatttcccac

SEQ ID NO: 4889 - DNA, 20 bp, Artificial Sequence
  Description of Artificial Sequence: Synthetic oligonucleotide
tagaaataccatttcccacc

SEQ ID NO: 4890 - DNA, 20 bp, Artificial Sequence
  Description of Artificial Sequence: Synthetic oligonucleotide
agaaataccatttcccacct

SEQ ID NO: 4891 - DNA, 20 bp, Artificial Sequence
  Description of Artificial Sequence: Synthetic oligonucleotide
gaaataccatttcccacctg

SEQ ID NO: 4892 - DNA, 20 bp, Artificial Sequence
  Description of Artificial Sequence: Synthetic oligonucleotide
aaataccatttcccacctgc

SEQ ID NO: 4893 - DNA, 20 bp, Artificial Sequence
  Description of Artificial Sequence: Synthetic oligonucleotide
aataccatttcccacctgcc

SEQ ID NO: 4894 - DNA, 20 bp, Artificial Sequence
  Description of Artificial Sequence: Synthetic oligonucleotide
ataccatttcccacctgcct

SEQ ID NO: 4895 - DNA, 20 bp, Artificial Sequence
  Description of Artificial Sequence: Synthetic oligonucleotide
taccatttcccacctgcctc

SEQ ID NO: 4896 - DNA, 20 bp, Artificial Sequence
  Description of Artificial Sequence: Synthetic oligonucleotide
accatttcccacctgcctcc

SEQ ID NO: 4897 - DNA, 20 bp, Artificial Sequence
  Description of Artificial Sequence: Synthetic oligonucleotide
ccatttcccacctgcctcct

SEQ ID NO: 4898 - DNA, 20 bp, Artificial Sequence
  Description of Artificial Sequence: Synthetic oligonucleotide
catttcccacctgcctcctt

SEQ ID NO: 4899 - DNA, 20 bp, Artificial Sequence
  Description of Artificial Sequence: Synthetic oligonucleotide
atttcccacctgcctccttc

SEQ ID NO: 4900 - DNA, 20 bp, Artificial Sequence
  Description of Artificial Sequence: Synthetic oligonucleotide
tttcccacctgcctccttca

SEQ ID NO: 4901 - DNA, 20 bp, Artificial Sequence
  Description of Artificial Sequence: Synthetic oligonucleotide
ttcccacctgcctccttcac

SEQ ID NO: 4902 - DNA, 20 bp, Artificial Sequence
  Description of Artificial Sequence: Synthetic oligonucleotide
tcccacctgcctccttcact

SEQ ID NO: 4903 - DNA, 20 bp, Artificial Sequence
  Description of Artificial Sequence: Synthetic oligonucleotide
cccacctgcctccttcactc

SEQ ID NO: 4904 - DNA, 20 bp, Artificial Sequence
  Description of Artificial Sequence: Synthetic oligonucleotide
ccacctgcctccttcactcc

SEQ ID NO: 4905 - DNA, 20 bp, Artificial Sequence
  Description of Artificial Sequence: Synthetic oligonucleotide
cacctgcctccttcactcct

SEQ ID NO: 4906 - DNA, 20 bp, Artificial Sequence
  Description of Artificial Sequence: Synthetic oligonucleotide
acctgcctccttcactcctt

SEQ ID NO: 4907 - DNA, 20 bp, Artificial Sequence
  Description of Artificial Sequence: Synthetic oligonucleotide
cctgcctccttcactccttt

SEQ ID NO: 4908 - DNA, 20 bp, Artificial Sequence
  Description of Artificial Sequence: Synthetic oligonucleotide
ctgcctccttcactcctttc

SEQ ID NO: 4909 - DNA, 20 bp, Artificial Sequence
  Description of Artificial Sequence: Synthetic oligonucleotide
tgcctccttcactcctttct

SEQ ID NO: 4910 - DNA, 20 bp, Artificial Sequence
  Description of Artificial Sequence: Synthetic oligonucleotide
gcctccttcactcctttctc

SEQ ID NO: 4911 - DNA, 20 bp, Artificial Sequence
  Description of Artificial Sequence: Synthetic oligonucleotide
cctccttcactcctttctct

SEQ ID NO: 4912 - DNA, 20 bp, Artificial Sequence
  Description of Artificial Sequence: Synthetic oligonucleotide
ctccttcactcctttctcta

SEQ ID NO: 4913 - DNA, 20 bp, Artificial Sequence
  Description of Artificial Sequence: Synthetic oligonucleotide
tccttcactcctttctctaa

SEQ ID NO: 4914 - DNA, 20 bp, Artificial Sequence
  Description of Artificial Sequence: Synthetic oligonucleotide
ccttcactcctttctctaac

SEQ ID NO: 4915 - DNA, 20 bp, Artificial Sequence
  Description of Artificial Sequence: Synthetic oligonucleotide
cttcactcctttctctaaca

SEQ ID NO: 4916 - DNA, 20 bp, Artificial Sequence
  Description of Artificial Sequence: Synthetic oligonucleotide
ttcactcctttctctaacac

SEQ ID NO: 4917 - DNA, 20 bp, Artificial Sequence
  Description of Artificial Sequence: Synthetic oligonucleotide
tcactcctttctctaacact

SEQ ID NO: 4918 - DNA, 20 bp, Artificial Sequence
  Description of Artificial Sequence: Synthetic oligonucleotide
cactcctttctctaacactc

SEQ ID NO: 4919 - DNA, 20 bp, Artificial Sequence
  Description of Artificial Sequence: Synthetic oligonucleotide
actcctttctctaacactca

SEQ ID NO: 4920 - DNA, 20 bp, Artificial Sequence
  Description of Artificial Sequence: Synthetic oligonucleotide
ctcctttctctaacactcaa

SEQ ID NO: 4921 - DNA, 20 bp, Artificial Sequence
  Description of Artificial Sequence: Synthetic oligonucleotide
tcctttctctaacactcaaa

SEQ ID NO: 4922 - DNA, 20 bp, Artificial Sequence
  Description of Artificial Sequence: Synthetic oligonucleotide
cctttctctaacactcaaag

SEQ ID NO: 4923 - DNA, 20 bp, Artificial Sequence
  Description of Artificial Sequence: Synthetic oligonucleotide
ctttctctaacactcaaagg

SEQ ID NO: 4924 - DNA, 20 bp, Artificial Sequence
  Description of Artificial Sequence: Synthetic oligonucleotide
tttctctaacactcaaaggc

SEQ ID NO: 4925 - DNA, 20 bp, Artificial Sequence
  Description of Artificial Sequence: Synthetic oligonucleotide
ttctctaacactcaaaggcc

SEQ ID NO: 4926 - DNA, 20 bp, Artificial Sequence
  Description of Artificial Sequence: Synthetic oligonucleotide
tctctaacactcaaaggcct

SEQ ID NO: 4927 - DNA, 20 bp, Artificial Sequence
  Description of Artificial Sequence: Synthetic oligonucleotide
ctctaacactcaaaggccta

SEQ ID NO: 4928 - DNA, 20 bp, Artificial Sequence
  Description of Artificial Sequence: Synthetic oligonucleotide
tctaacactcaaaggcctat

SEQ ID NO: 4929 - DNA, 20 bp, Artificial Sequence
  Description of Artificial Sequence: Synthetic oligonucleotide
ctaacactcaaaggcctatc

SEQ ID NO: 4930 - DNA, 20 bp, Artificial Sequence
  Description of Artificial Sequence: Synthetic oligonucleotide
taacactcaaaggcctatcc

SEQ ID NO: 4931 - DNA, 20 bp, Artificial Sequence
  Description of Artificial Sequence: Synthetic oligonucleotide
aacactcaaaggcctatcct

SEQ ID NO: 4932 - DNA, 20 bp, Artificial Sequence
  Description of Artificial Sequence: Synthetic oligonucleotide
acactcaaaggcctatcctt

SEQ ID NO: 4933 - DNA, 20 bp, Artificial Sequence
  Description of Artificial Sequence: Synthetic oligonucleotide
cactcaaaggcctatccttt

SEQ ID NO: 4934 - DNA, 20 bp, Artificial Sequence
  Description of Artificial Sequence: Synthetic oligonucleotide
actcaaaggcctatcctttg

SEQ ID NO: 4935 - DNA, 20 bp, Artificial Sequence
  Description of Artificial Sequence: Synthetic oligonucleotide
ctcaaaggcctatcctttga

SEQ ID NO: 4936 - DNA, 20 bp, Artificial Sequence
  Description of Artificial Sequence: Synthetic oligonucleotide
tcaaaggcctatcctttgag

SEQ ID NO: 4937 - DNA, 20 bp, Artificial Sequence
  Description of Artificial Sequence: Synthetic oligonucleotide
caaaggcctatcctttgaga

SEQ ID NO: 4938 - DNA, 20 bp, Artificial Sequence
  Description of Artificial Sequence: Synthetic oligonucleotide
aaaggcctatcctttgagaa

SEQ ID NO: 4939 - DNA, 20 bp, Artificial Sequence
  Description of Artificial Sequence: Synthetic oligonucleotide
aaggcctatcctttgagaat

SEQ ID NO: 4940 - DNA, 20 bp, Artificial Sequence
  Description of Artificial Sequence: Synthetic oligonucleotide
aggcctatcctttgagaatc

SEQ ID NO: 4941 - DNA, 20 bp, Artificial Sequence
  Description of Artificial Sequence: Synthetic oligonucleotide
ggcctatcctttgagaatca

SEQ ID NO: 4942 - DNA, 20 bp, Artificial Sequence
  Description of Artificial Sequence: Synthetic oligonucleotide
gcctatcctttgagaatcaa

SEQ ID NO: 4943 - DNA, 20 bp, Artificial Sequence
  Description of Artificial Sequence: Synthetic oligonucleotide
cctatcctttgagaatcaaa

SEQ ID NO: 4944 - DNA, 20 bp, Artificial Sequence
  Description of Artificial Sequence: Synthetic oligonucleotide
ctatcctttgagaatcaaaa

SEQ ID NO: 4945 - DNA, 20 bp, Artificial Sequence
  Description of Artificial Sequence: Synthetic oligonucleotide
tatcctttgagaatcaaaat

SEQ ID NO: 4946 - DNA, 20 bp, Artificial Sequence
  Description of Artificial Sequence: Synthetic oligonucleotide
atcctttgagaatcaaaata

SEQ ID NO: 4947 - DNA, 20 bp, Artificial Sequence
  Description of Artificial Sequence: Synthetic oligonucleotide
tcctttgagaatcaaaataa

SEQ ID NO: 4948 - DNA, 20 bp, Artificial Sequence
  Description of Artificial Sequence: Synthetic oligonucleotide
cctttgagaatcaaaataat

SEQ ID NO: 4949 - DNA, 20 bp, Artificial Sequence
  Description of Artificial Sequence: Synthetic oligonucleotide
ctttgagaatcaaaataata

SEQ ID NO: 4950 - DNA, 20 bp, Artificial Sequence
  Description of Artificial Sequence: Synthetic oligonucleotide
tttgagaatcaaaataatat

SEQ ID NO: 4951 - DNA, 20 bp, Artificial Sequence
  Description of Artificial Sequence: Synthetic oligonucleotide
ttgagaatcaaaataatatg

SEQ ID NO: 4952 - DNA, 20 bp, Artificial Sequence
  Description of Artificial Sequence: Synthetic oligonucleotide
tgagaatcaaaataatatgg

SEQ ID NO: 4953 - DNA, 20 bp, Artificial Sequence
  Description of Artificial Sequence: Synthetic oligonucleotide
gagaatcaaaataatatggt

SEQ ID NO: 4954 - DNA, 20 bp, Artificial Sequence
  Description of Artificial Sequence: Synthetic oligonucleotide
agaatcaaaataatatggtt

SEQ ID NO: 4955 - DNA, 20 bp, Artificial Sequence
  Description of Artificial Sequence: Synthetic oligonucleotide
gaatcaaaataatatggttc

SEQ ID NO: 4956 - DNA, 20 bp, Artificial Sequence
  Description of Artificial Sequence: Synthetic oligonucleotide
aatcaaaataatatggttct

SEQ ID NO: 4957 - DNA, 20 bp, Artificial Sequence
  Description of Artificial Sequence: Synthetic oligonucleotide
atcaaaataatatggttctt

SEQ ID NO: 4958 - DNA, 20 bp, Artificial Sequence
  Description of Artificial Sequence: Synthetic oligonucleotide
tcaaaataatatggttcttt

SEQ ID NO: 4959 - DNA, 20 bp, Artificial Sequence
  Description of Artificial Sequence: Synthetic oligonucleotide
caaaataatatggttctttt

SEQ ID NO: 4960 - DNA, 20 bp, Artificial Sequence
  Description of Artificial Sequence: Synthetic oligonucleotide
aaaataatatggttcttttt

SEQ ID NO: 4961 - DNA, 20 bp, Artificial Sequence
  Description of Artificial Sequence: Synthetic oligonucleotide
aaataatatggttcttttta

SEQ ID NO: 4962 - DNA, 20 bp, Artificial Sequence
  Description of Artificial Sequence: Synthetic oligonucleotide
aataatatggttctttttag

SEQ ID NO: 4963 - DNA, 20 bp, Artificial Sequence
  Description of Artificial Sequence: Synthetic oligonucleotide
ataatatggttctttttagc

SEQ ID NO: 4964 - DNA, 20 bp, Artificial Sequence
  Description of Artificial Sequence: Synthetic oligonucleotide
taatatggttctttttagca

SEQ ID NO: 4965 - DNA, 20 bp, Artificial Sequence
  Description of Artificial Sequence: Synthetic oligonucleotide
aatatggttctttttagcaa

SEQ ID NO: 4966 - DNA, 20 bp, Artificial Sequence
  Description of Artificial Sequence: Synthetic oligonucleotide
atatggttctttttagcaaa

SEQ ID NO: 4967 - DNA, 20 bp, Artificial Sequence
  Description of Artificial Sequence: Synthetic oligonucleotide
tatggttctttttagcaaag

SEQ ID NO: 4968 - DNA, 20 bp, Artificial Sequence
  Description of Artificial Sequence: Synthetic oligonucleotide
atggttctttttagcaaagg

SEQ ID NO: 4969 - DNA, 20 bp, Artificial Sequence
  Description of Artificial Sequence: Synthetic oligonucleotide
tggttctttttagcaaaggg

SEQ ID NO: 4970 - DNA, 20 bp, Artificial Sequence
  Description of Artificial Sequence: Synthetic oligonucleotide
ggttctttttagcaaaggga

SEQ ID NO: 4971 - DNA, 20 bp, Artificial Sequence
  Description of Artificial Sequence: Synthetic oligonucleotide
gttctttttagcaaagggat

SEQ ID NO: 4972 - DNA, 20 bp, Artificial Sequence
  Description of Artificial Sequence: Synthetic oligonucleotide
ttctttttagcaaagggatt

SEQ ID NO: 4973 - DNA, 20 bp, Artificial Sequence
  Description of Artificial Sequence: Synthetic oligonucleotide
tctttttagcaaagggattt

SEQ ID NO: 4974 - DNA, 20 bp, Artificial Sequence
  Description of Artificial Sequence: Synthetic oligonucleotide
ctttttagcaaagggatttg

SEQ ID NO: 4975 - DNA, 20 bp, Artificial Sequence
  Description of Artificial Sequence: Synthetic oligonucleotide
tttttagcaaagggatttgt

SEQ ID NO: 4976 - DNA, 20 bp, Artificial Sequence
  Description of Artificial Sequence: Synthetic oligonucleotide
ttttagcaaagggatttgtg

SEQ ID NO: 4977 - DNA, 20 bp, Artificial Sequence
  Description of Artificial Sequence: Synthetic oligonucleotide
tttagcaaagggatttgtgt

SEQ ID NO: 4978 - DNA, 20 bp, Artificial Sequence
  Description of Artificial Sequence: Synthetic oligonucleotide
ttagcaaagggatttgtgtt

SEQ ID NO: 4979 - DNA, 20 bp, Artificial Sequence
  Description of Artificial Sequence: Synthetic oligonucleotide
tagcaaagggatttgtgttt

SEQ ID NO: 4980 - DNA, 20 bp, Artificial Sequence
  Description of Artificial Sequence: Synthetic oligonucleotide
agcaaagggatttgtgtttt

SEQ ID NO: 4981 - DNA, 20 bp, Artificial Sequence
  Description of Artificial Sequence: Synthetic oligonucleotide
gcaaagggatttgtgttttg

SEQ ID NO: 4982 - DNA, 20 bp, Artificial Sequence
  Description of Artificial Sequence: Synthetic oligonucleotide
caaagggatttgtgttttgc

SEQ ID NO: 4983 - DNA, 20 bp, Artificial Sequence
  Description of Artificial Sequence: Synthetic oligonucleotide
aaagggatttgtgttttgcc

SEQ ID NO: 4984 - DNA, 20 bp, Artificial Sequence
  Description of Artificial Sequence: Synthetic oligonucleotide
aagggatttgtgttttgccc

SEQ ID NO: 4985 - DNA, 20 bp, Artificial Sequence
  Description of Artificial Sequence: Synthetic oligonucleotide
agggatttgtgttttgccct

SEQ ID NO: 4986 - DNA, 20 bp, Artificial Sequence
  Description of Artificial Sequence: Synthetic oligonucleotide
gggatttgtgttttgccctc

SEQ ID NO: 4987 - DNA, 20 bp, Artificial Sequence
  Description of Artificial Sequence: Synthetic oligonucleotide
ggatttgtgttttgccctca

SEQ ID NO: 4988 - DNA, 20 bp, Artificial Sequence
  Description of Artificial Sequence: Synthetic oligonucleotide
gatttgtgttttgccctcac

SEQ ID NO: 4989 - DNA, 20 bp, Artificial Sequence
  Description of Artificial Sequence: Synthetic oligonucleotide
atttgtgttttgccctcaca

SEQ ID NO: 4990 - DNA, 20 bp, Artificial Sequence
  Description of Artificial Sequence: Synthetic oligonucleotide
tttgtgttttgccctcacat

SEQ ID NO: 4991 - DNA, 20 bp, Artificial Sequence
  Description of Artificial Sequence: Synthetic oligonucleotide
ttgtgttttgccctcacata

SEQ ID NO: 4992 - DNA, 20 bp, Artificial Sequence
  Description of Artificial Sequence: Synthetic oligonucleotide
tgtgttttgccctcacatag

SEQ ID NO: 4993 - DNA, 20 bp, Artificial Sequence
  Description of Artificial Sequence: Synthetic oligonucleotide
gtgttttgccctcacatagc

SEQ ID NO: 4994 - DNA, 20 bp, Artificial Sequence
  Description of Artificial Sequence: Synthetic oligonucleotide
tgttttgccctcacatagcc

SEQ ID NO: 4995 - DNA, 20 bp, Artificial Sequence
  Description of Artificial Sequence: Synthetic oligonucleotide
gttttgccctcacatagcct

SEQ ID NO: 4996 - DNA, 20 bp, Artificial Sequence
  Description of Artificial Sequence: Synthetic oligonucleotide
ttttgccctcacatagccta

SEQ ID NO: 4997 - DNA, 20 bp, Artificial Sequence
  Description of Artificial Sequence: Synthetic oligonucleotide
tttgccctcacatagcctaa

SEQ ID NO: 4998 - DNA, 20 bp, Artificial Sequence
  Description of Artificial Sequence: Synthetic oligonucleotide
ttgccctcacatagcctaag

SEQ ID NO: 4999 - DNA, 20 bp, Artificial Sequence
  Description of Artificial Sequence: Synthetic oligonucleotide
tgccctcacatagcctaagc

SEQ ID NO: 5000 - DNA, 20 bp, Artificial Sequence
  Description of Artificial Sequence: Synthetic oligonucleotide
gccctcacatagcctaagcc

SEQ ID NO: 5001 - DNA, 20 bp, Artificial Sequence
  Description of Artificial Sequence: Synthetic oligonucleotide
ccctcacatagcctaagccg

SEQ ID NO: 5002 - DNA, 20 bp, Artificial Sequence
  Description of Artificial Sequence: Synthetic oligonucleotide
cctcacatagcctaagccgt

SEQ ID NO: 5003 - DNA, 20 bp, Artificial Sequence
  Description of Artificial Sequence: Synthetic oligonucleotide
ctcacatagcctaagccgta

SEQ ID NO: 5004 - DNA, 20 bp, Artificial Sequence
  Description of Artificial Sequence: Synthetic oligonucleotide
tcacatagcctaagccgtag

SEQ ID NO: 5005 - DNA, 20 bp, Artificial Sequence
  Description of Artificial Sequence: Synthetic oligonucleotide
cacatagcctaagccgtaga

SEQ ID NO: 5006 - DNA, 20 bp, Artificial Sequence
  Description of Artificial Sequence: Synthetic oligonucleotide
acatagcctaagccgtagag

SEQ ID NO: 5007 - DNA, 20 bp, Artificial Sequence
  Description of Artificial Sequence: Synthetic oligonucleotide
catagcctaagccgtagaga

SEQ ID NO: 5008 - DNA, 20 bp, Artificial Sequence
  Description of Artificial Sequence: Synthetic oligonucleotide
atagcctaagccgtagagaa

SEQ ID NO: 5009 - DNA, 20 bp, Artificial Sequence
  Description of Artificial Sequence: Synthetic oligonucleotide
tagcctaagccgtagagaaa

SEQ ID NO: 5010 - DNA, 20 bp, Artificial Sequence
  Description of Artificial Sequence: Synthetic oligonucleotide
agcctaagccgtagagaaaa

SEQ ID NO: 5011 - DNA, 20 bp, Artificial Sequence
  Description of Artificial Sequence: Synthetic oligonucleotide
gcctaagccgtagagaaaat

SEQ ID NO: 5012 - DNA, 20 bp, Artificial Sequence
  Description of Artificial Sequence: Synthetic oligonucleotide
cctaagccgtagagaaaata

SEQ ID NO: 5013 - DNA, 20 bp, Artificial Sequence
  Description of Artificial Sequence: Synthetic oligonucleotide
ctaagccgtagagaaaatag

SEQ ID NO: 5014 - DNA, 20 bp, Artificial Sequence
  Description of Artificial Sequence: Synthetic oligonucleotide
taagccgtagagaaaataga

SEQ ID NO: 5015 - DNA, 20 bp, Artificial Sequence
  Description of Artificial Sequence: Synthetic oligonucleotide
aagccgtagagaaaatagat

SEQ ID NO: 5016 - DNA, 20 bp, Artificial Sequence
  Description of Artificial Sequence: Synthetic oligonucleotide
agccgtagagaaaatagata

SEQ ID NO: 5017 - DNA, 20 bp, Artificial Sequence
  Description of Artificial Sequence: Synthetic oligonucleotide
gccgtagagaaaatagataa

SEQ ID NO: 5018 - DNA, 20 bp, Artificial Sequence
  Description of Artificial Sequence: Synthetic oligonucleotide
ccgtagagaaaatagataaa

SEQ ID NO: 5019 - DNA, 20 bp, Artificial Sequence
  Description of Artificial Sequence: Synthetic oligonucleotide
cgtagagaaaatagataaaa

SEQ ID NO: 5020 - DNA, 20 bp, Artificial Sequence
  Description of Artificial Sequence: Synthetic oligonucleotide
gtagagaaaatagataaaac

SEQ ID NO: 5021 - DNA, 20 bp, Artificial Sequence
  Description of Artificial Sequence: Synthetic oligonucleotide
tagagaaaatagataaaacg

SEQ ID NO: 5022 - DNA, 20 bp, Artificial Sequence
  Description of Artificial Sequence: Synthetic oligonucleotide
agagaaaatagataaaacga

SEQ ID NO: 5023 - DNA, 20 bp, Artificial Sequence
  Description of Artificial Sequence: Synthetic oligonucleotide
gagaaaatagataaaacgat

SEQ ID NO: 5024 - DNA, 20 bp, Artificial Sequence
  Description of Artificial Sequence: Synthetic oligonucleotide
agaaaatagataaaacgatc

SEQ ID NO: 5025 - DNA, 20 bp, Artificial Sequence
  Description of Artificial Sequence: Synthetic oligonucleotide
gaaaatagataaaacgatct

SEQ ID NO: 5026 - DNA, 20 bp, Artificial Sequence
  Description of Artificial Sequence: Synthetic oligonucleotide
aaaatagataaaacgatctc

SEQ ID NO: 5027 - DNA, 20 bp, Artificial Sequence
  Description of Artificial Sequence: Synthetic oligonucleotide
aaatagataaaacgatctca

SEQ ID NO: 5028 - DNA, 20 bp, Artificial Sequence
  Description of Artificial Sequence: Synthetic oligonucleotide
aatagataaaacgatctcaa

SEQ ID NO: 5029 - DNA, 20 bp, Artificial Sequence
  Description of Artificial Sequence: Synthetic oligonucleotide
atagataaaacgatctcaaa

SEQ ID NO: 5030 - DNA, 20 bp, Artificial Sequence
  Description of Artificial Sequence: Synthetic oligonucleotide
tagataaaacgatctcaaaa

SEQ ID NO: 5031 - DNA, 20 bp, Artificial Sequence
  Description of Artificial Sequence: Synthetic oligonucleotide
agataaaacgatctcaaaat

SEQ ID NO: 5032 - DNA, 20 bp, Artificial Sequence
  Description of Artificial Sequence: Synthetic oligonucleotide
gataaaacgatctcaaaatt

SEQ ID NO: 5033 - DNA, 20 bp, Artificial Sequence
  Description of Artificial Sequence: Synthetic oligonucleotide
ataaaacgatctcaaaatta

SEQ ID NO: 5034 - DNA, 20 bp, Artificial Sequence
  Description of Artificial Sequence: Synthetic oligonucleotide
taaaacgatctcaaaattat

SEQ ID NO: 5035 - DNA, 20 bp, Artificial Sequence
  Description of Artificial Sequence: Synthetic oligonucleotide
aaaacgatctcaaaattatt

SEQ ID NO: 5036 - DNA, 20 bp, Artificial Sequence
  Description of Artificial Sequence: Synthetic oligonucleotide
aaacgatctcaaaattattt

SEQ ID NO: 5037 - DNA, 20 bp, Artificial Sequence
  Description of Artificial Sequence: Synthetic oligonucleotide
aacgatctcaaaattatttt

SEQ ID NO: 5038 - DNA, 20 bp, Artificial Sequence
  Description of Artificial Sequence: Synthetic oligonucleotide
acgatctcaaaattattttc

SEQ ID NO: 5039 - DNA, 20 bp, Artificial Sequence
  Description of Artificial Sequence: Synthetic oligonucleotide
cgatctcaaaattattttct

SEQ ID NO: 5040 - DNA, 20 bp, Artificial Sequence
  Description of Artificial Sequence: Synthetic oligonucleotide
gatctcaaaattattttctt

SEQ ID NO: 5041 - DNA, 20 bp, Artificial Sequence
  Description of Artificial Sequence: Synthetic oligonucleotide
atctcaaaattattttcttt

SEQ ID NO: 5042 - DNA, 20 bp, Artificial Sequence
  Description of Artificial Sequence: Synthetic oligonucleotide
tctcaaaattattttctttc

SEQ ID NO: 5043 - DNA, 20 bp, Artificial Sequence
  Description of Artificial Sequence: Synthetic oligonucleotide
ctcaaaattattttctttca

SEQ ID NO: 5044 - DNA, 20 bp, Artificial Sequence
  Description of Artificial Sequence: Synthetic oligonucleotide
tcaaaattattttctttcac

SEQ ID NO: 5045 - DNA, 20 bp, Artificial Sequence
  Description of Artificial Sequence: Synthetic oligonucleotide
caaaattattttctttcaca

SEQ ID NO: 5046 - DNA, 20 bp, Artificial Sequence
  Description of Artificial Sequence: Synthetic oligonucleotide
aaaattattttctttcacag

SEQ ID NO: 5047 - DNA, 20 bp, Artificial Sequence
  Description of Artificial Sequence: Synthetic oligonucleotide
aaattattttctttcacaga

SEQ ID NO: 5048 - DNA, 20 bp, Artificial Sequence
  Description of Artificial Sequence: Synthetic oligonucleotide
aattattttctttcacagac

SEQ ID NO: 5049 - DNA, 20 bp, Artificial Sequence
  Description of Artificial Sequence: Synthetic oligonucleotide
attattttctttcacagaca

SEQ ID NO: 5050 - DNA, 20 bp, Artificial Sequence
  Description of Artificial Sequence: Synthetic oligonucleotide
ttattttctttcacagacaa

SEQ ID NO: 5051 - DNA, 20 bp, Artificial Sequence
  Description of Artificial Sequence: Synthetic oligonucleotide
tattttctttcacagacaaa

SEQ ID NO: 5052 - DNA, 20 bp, Artificial Sequence
  Description of Artificial Sequence: Synthetic oligonucleotide
attttctttcacagacaaat

SEQ ID NO: 5053 - DNA, 20 bp, Artificial Sequence
  Description of Artificial Sequence: Synthetic oligonucleotide
ttttctttcacagacaaatc

SEQ ID NO: 5054 - DNA, 20 bp, Artificial Sequence
  Description of Artificial Sequence: Synthetic oligonucleotide
tttctttcacagacaaatca

SEQ ID NO: 5055 - DNA, 20 bp, Artificial Sequence
  Description of Artificial Sequence: Synthetic oligonucleotide
ttctttcacagacaaatcat

SEQ ID NO: 5056 - DNA, 20 bp, Artificial Sequence
  Description of Artificial Sequence: Synthetic oligonucleotide
tctttcacagacaaatcatg

SEQ ID NO: 5057 - DNA, 20 bp, Artificial Sequence
  Description of Artificial Sequence: Synthetic oligonucleotide
ctttcacagacaaatcatgt

SEQ ID NO: 5058 - DNA, 20 bp, Artificial Sequence
  Description of Artificial Sequence: Synthetic oligonucleotide
tttcacagacaaatcatgtg

SEQ ID NO: 5059 - DNA, 20 bp, Artificial Sequence
  Description of Artificial Sequence: Synthetic oligonucleotide
ttcacagacaaatcatgtgg

SEQ ID NO: 5060 - DNA, 20 bp, Artificial Sequence
  Description of Artificial Sequence: Synthetic oligonucleotide
tcacagacaaatcatgtgga

SEQ ID NO: 5061 - DNA, 20 bp, Artificial Sequence
  Description of Artificial Sequence: Synthetic oligonucleotide
cacagacaaatcatgtggaa

SEQ ID NO: 5062 - DNA, 20 bp, Artificial Sequence
  Description of Artificial Sequence: Synthetic oligonucleotide
acagacaaatcatgtggaaa

SEQ ID NO: 5063 - DNA, 20 bp, Artificial Sequence
  Description of Artificial Sequence: Synthetic oligonucleotide
cagacaaatcatgtggaaaa

SEQ ID NO: 5064 - DNA, 20 bp, Artificial Sequence
  Description of Artificial Sequence: Synthetic oligonucleotide
agacaaatcatgtggaaaag

SEQ ID NO: 5065 - DNA, 20 bp, Artificial Sequence
  Description of Artificial Sequence: Synthetic oligonucleotide
gacaaatcatgtggaaaaga

SEQ ID NO: 5066 - DNA, 20 bp, Artificial Sequence
  Description of Artificial Sequence: Synthetic oligonucleotide
acaaatcatgtggaaaagac

SEQ ID NO: 5067 - DNA, 20 bp, Artificial Sequence
  Description of Artificial Sequence: Synthetic oligonucleotide
caaatcatgtggaaaagaca

SEQ ID NO: 5068 - DNA, 20 bp, Artificial Sequence
  Description of Artificial Sequence: Synthetic oligonucleotide
aaatcatgtggaaaagacaa

SEQ ID NO: 5069 - DNA, 20 bp, Artificial Sequence
  Description of Artificial Sequence: Synthetic oligonucleotide
aatcatgtggaaaagacaag

SEQ ID NO: 5070 - DNA, 20 bp, Artificial Sequence
  Description of Artificial Sequence: Synthetic oligonucleotide
atcatgtggaaaagacaagc

SEQ ID NO: 5071 - DNA, 20 bp, Artificial Sequence
  Description of Artificial Sequence: Synthetic oligonucleotide
tcatgtggaaaagacaagct

SEQ ID NO: 5072 - DNA, 20 bp, Artificial Sequence
  Description of Artificial Sequence: Synthetic oligonucleotide
catgtggaaaagacaagcta

SEQ ID NO: 5073 - DNA, 20 bp, Artificial Sequence
  Description of Artificial Sequence: Synthetic oligonucleotide
atgtggaaaagacaagctac

SEQ ID NO: 5074 - DNA, 20 bp, Artificial Sequence
  Description of Artificial Sequence: Synthetic oligonucleotide
tgtggaaaagacaagctact

SEQ ID NO: 5075 - DNA, 20 bp, Artificial Sequence
  Description of Artificial Sequence: Synthetic oligonucleotide
gtggaaaagacaagctactg

SEQ ID NO: 5076 - DNA, 20 bp, Artificial Sequence
  Description of Artificial Sequence: Synthetic oligonucleotide
tggaaaagacaagctactgc

SEQ ID NO: 5077 - DNA, 20 bp, Artificial Sequence
  Description of Artificial Sequence: Synthetic oligonucleotide
ggaaaagacaagctactgct

SEQ ID NO: 5078 - DNA, 20 bp, Artificial Sequence
  Description of Artificial Sequence: Synthetic oligonucleotide
gaaaagacaagctactgcta

SEQ ID NO: 5079 - DNA, 20 bp, Artificial Sequence
  Description of Artificial Sequence: Synthetic oligonucleotide
aaaagacaagctactgctat

SEQ ID NO: 5080 - DNA, 20 bp, Artificial Sequence
  Description of Artificial Sequence: Synthetic oligonucleotide
aaagacaagctactgctatg

SEQ ID NO: 5081 - DNA, 20 bp, Artificial Sequence
  Description of Artificial Sequence: Synthetic oligonucleotide
aagacaagctactgctatgt

SEQ ID NO: 5082 - DNA, 20 bp, Artificial Sequence
  Description of Artificial Sequence: Synthetic oligonucleotide
agacaagctactgctatgtc

SEQ ID NO: 5083 - DNA, 20 bp, Artificial Sequence
  Description of Artificial Sequence: Synthetic oligonucleotide
gacaagctactgctatgtca

SEQ ID NO: 5084 - DNA, 20 bp, Artificial Sequence
  Description of Artificial Sequence: Synthetic oligonucleotide
acaagctactgctatgtcag

SEQ ID NO: 5085 - DNA, 20 bp, Artificial Sequence
  Description of Artificial Sequence: Synthetic oligonucleotide
caagctactgctatgtcagg

SEQ ID NO: 5086 - DNA, 20 bp, Artificial Sequence
  Description of Artificial Sequence: Synthetic oligonucleotide
aagctactgctatgtcaggg

SEQ ID NO: 5087 - DNA, 20 bp, Artificial Sequence
  Description of Artificial Sequence: Synthetic oligonucleotide
agctactgctatgtcaggga

SEQ ID NO: 5088 - DNA, 20 bp, Artificial Sequence
  Description of Artificial Sequence: Synthetic oligonucleotide
gctactgctatgtcagggat

SEQ ID NO: 5089 - DNA, 20 bp, Artificial Sequence
  Description of Artificial Sequence: Synthetic oligonucleotide
ctactgctatgtcagggatc

SEQ ID NO: 5090 - DNA, 20 bp, Artificial Sequence
  Description of Artificial Sequence: Synthetic oligonucleotide
tactgctatgtcagggatct

SEQ ID NO: 5091 - DNA, 20 bp, Artificial Sequence
  Description of Artificial Sequence: Synthetic oligonucleotide
actgctatgtcagggatctt

SEQ ID NO: 5092 - DNA, 20 bp, Artificial Sequence
  Description of Artificial Sequence: Synthetic oligonucleotide
ctgctatgtcagggatcttg

SEQ ID NO: 5093 - DNA, 20 bp, Artificial Sequence
  Description of Artificial Sequence: Synthetic oligonucleotide
tgctatgtcagggatcttgg

SEQ ID NO: 5094 - DNA, 20 bp, Artificial Sequence
  Description of Artificial Sequence: Synthetic oligonucleotide
gctatgtcagggatcttggg

SEQ ID NO: 5095 - DNA, 20 bp, Artificial Sequence
  Description of Artificial Sequence: Synthetic oligonucleotide
ctatgtcagggatcttgggc

SEQ ID NO: 5096 - DNA, 20 bp, Artificial Sequence
  Description of Artificial Sequence: Synthetic oligonucleotide
tatgtcagggatcttgggca

SEQ ID NO: 5097 - DNA, 20 bp, Artificial Sequence
  Description of Artificial Sequence: Synthetic oligonucleotide
atgtcagggatcttgggcag

SEQ ID NO: 5098 - DNA, 20 bp, Artificial Sequence
  Description of Artificial Sequence: Synthetic oligonucleotide
tgtcagggatcttgggcaga

SEQ ID NO: 5099 - DNA, 20 bp, Artificial Sequence
  Description of Artificial Sequence: Synthetic oligonucleotide
gtcagggatcttgggcagag

SEQ ID NO: 5100 - DNA, 20 bp, Artificial Sequence
  Description of Artificial Sequence: Synthetic oligonucleotide
tcagggatcttgggcagaga

SEQ ID NO: 5101 - DNA, 20 bp, Artificial Sequence
  Description of Artificial Sequence: Synthetic oligonucleotide
cagggatcttgggcagagag

SEQ ID NO: 5102 - DNA, 20 bp, Artificial Sequence
  Description of Artificial Sequence: Synthetic oligonucleotide
agggatcttgggcagagaga

SEQ ID NO: 5103 - DNA, 20 bp, Artificial Sequence
  Description of Artificial Sequence: Synthetic oligonucleotide
gggatcttgggcagagagac

SEQ ID NO: 5104 - DNA, 20 bp, Artificial Sequence
  Description of Artificial Sequence: Synthetic oligonucleotide
ggatcttgggcagagagacc

SEQ ID NO: 5105 - DNA, 20 bp, Artificial Sequence
  Description of Artificial Sequence: Synthetic oligonucleotide
gatcttgggcagagagaccc

SEQ ID NO: 5106 - DNA, 20 bp, Artificial Sequence
  Description of Artificial Sequence: Synthetic oligonucleotide
atcttgggcagagagacccc

SEQ ID NO: 5107 - DNA, 20 bp, Artificial Sequence
  Description of Artificial Sequence: Synthetic oligonucleotide
tcttgggcagagagacccca

SEQ ID NO: 5108 - DNA, 20 bp, Artificial Sequence
  Description of Artificial Sequence: Synthetic oligonucleotide
cttgggcagagagaccccac

SEQ ID NO: 5109 - DNA, 20 bp, Artificial Sequence
  Description of Artificial Sequence: Synthetic oligonucleotide
ttgggcagagagaccccact

SEQ ID NO: 5110 - DNA, 20 bp, Artificial Sequence
  Description of Artificial Sequence: Synthetic oligonucleotide
tgggcagagagaccccactc

SEQ ID NO: 5111 - DNA, 20 bp, Artificial Sequence
  Description of Artificial Sequence: Synthetic oligonucleotide
gggcagagagaccccactca

SEQ ID NO: 5112 - DNA, 20 bp, Artificial Sequence
  Description of Artificial Sequence: Synthetic oligonucleotide
ggcagagagaccccactcag

SEQ ID NO: 5113 - DNA, 20 bp, Artificial Sequence
  Description of Artificial Sequence: Synthetic oligonucleotide
gcagagagaccccactcagt

SEQ ID NO: 5114 - DNA, 20 bp, Artificial Sequence
  Description of Artificial Sequence: Synthetic oligonucleotide
cagagagaccccactcagtc

SEQ ID NO: 5115 - DNA, 20 bp, Artificial Sequence
  Description of Artificial Sequence: Synthetic oligonucleotide
agagagaccccactcagtct

SEQ ID NO: 5116 - DNA, 20 bp, Artificial Sequence
  Description of Artificial Sequence: Synthetic oligonucleotide
gagagaccccactcagtcta

SEQ ID NO: 5117 - DNA, 20 bp, Artificial Sequence
  Description of Artificial Sequence: Synthetic oligonucleotide
agagaccccactcagtctac

SEQ ID NO: 5118 - DNA, 20 bp, Artificial Sequence
  Description of Artificial Sequence: Synthetic oligonucleotide
gagaccccactcagtctacc

SEQ ID NO: 5119 - DNA, 20 bp, Artificial Sequence
  Description of Artificial Sequence: Synthetic oligonucleotide
agaccccactcagtctacca

SEQ ID NO: 5120 - DNA, 20 bp, Artificial Sequence
  Description of Artificial Sequence: Synthetic oligonucleotide
gaccccactcagtctaccac

SEQ ID NO: 5121 - DNA, 20 bp, Artificial Sequence
  Description of Artificial Sequence: Synthetic oligonucleotide
accccactcagtctaccacc

SEQ ID NO: 5122 - DNA, 20 bp, Artificial Sequence
  Description of Artificial Sequence: Synthetic oligonucleotide
ccccactcagtctaccacct

SEQ ID NO: 5123 - DNA, 20 bp, Artificial Sequence
  Description of Artificial Sequence: Synthetic oligonucleotide
cccactcagtctaccacctt

SEQ ID NO: 5124 - DNA, 20 bp, Artificial Sequence
  Description of Artificial Sequence: Synthetic oligonucleotide
ccactcagtctaccaccttg

SEQ ID NO: 5125 - DNA, 20 bp, Artificial Sequence
  Description of Artificial Sequence: Synthetic oligonucleotide
cactcagtctaccaccttga

SEQ ID NO: 5126 - DNA, 20 bp, Artificial Sequence
  Description of Artificial Sequence: Synthetic oligonucleotide
actcagtctaccaccttgag

SEQ ID NO: 5127 - DNA, 20 bp, Artificial Sequence
  Description of Artificial Sequence: Synthetic oligonucleotide
ctcagtctaccaccttgaga

SEQ ID NO: 5128 - DNA, 20 bp, Artificial Sequence
  Description of Artificial Sequence: Synthetic oligonucleotide
tcagtctaccaccttgagaa

SEQ ID NO: 5129 - DNA, 20 bp, Artificial Sequence
  Description of Artificial Sequence: Synthetic oligonucleotide
cagtctaccaccttgagaag

SEQ ID NO: 5130 - DNA, 20 bp, Artificial Sequence
  Description of Artificial Sequence: Synthetic oligonucleotide
agtctaccaccttgagaagg

SEQ ID NO: 5131 - DNA, 20 bp, Artificial Sequence
  Description of Artificial Sequence: Synthetic oligonucleotide
gtctaccaccttgagaagga

SEQ ID NO: 5132 - DNA, 20 bp, Artificial Sequence
  Description of Artificial Sequence: Synthetic oligonucleotide
tctaccaccttgagaaggat

SEQ ID NO: 5133 - DNA, 20 bp, Artificial Sequence
  Description of Artificial Sequence: Synthetic oligonucleotide
ctaccaccttgagaaggatg

SEQ ID NO: 5134 - DNA, 20 bp, Artificial Sequence
  Description of Artificial Sequence: Synthetic oligonucleotide
taccaccttgagaaggatgt

SEQ ID NO: 5135 - DNA, 20 bp, Artificial Sequence
  Description of Artificial Sequence: Synthetic oligonucleotide
accaccttgagaaggatgtg

SEQ ID NO: 5136 - DNA, 20 bp, Artificial Sequence
  Description of Artificial Sequence: Synthetic oligonucleotide
ccaccttgagaaggatgtgg

SEQ ID NO: 5137 - DNA, 20 bp, Artificial Sequence
  Description of Artificial Sequence: Synthetic oligonucleotide
caccttgagaaggatgtggc

SEQ ID NO: 5138 - DNA, 20 bp, Artificial Sequence
  Description of Artificial Sequence: Synthetic oligonucleotide
accttgagaaggatgtggca

SEQ ID NO: 5139 - DNA, 20 bp, Artificial Sequence
  Description of Artificial Sequence: Synthetic oligonucleotide
ccttgagaaggatgtggcag

SEQ ID NO: 5140 - DNA, 20 bp, Artificial Sequence
  Description of Artificial Sequence: Synthetic oligonucleotide
cttgagaaggatgtggcagg

SEQ ID NO: 5141 - DNA, 20 bp, Artificial Sequence
  Description of Artificial Sequence: Synthetic oligonucleotide
ttgagaaggatgtggcagga

SEQ ID NO: 5142 - DNA, 20 bp, Artificial Sequence
  Description of Artificial Sequence: Synthetic oligonucleotide
tgagaaggatgtggcaggac

SEQ ID NO: 5143 - DNA, 20 bp, Artificial Sequence
  Description of Artificial Sequence: Synthetic oligonucleotide
gagaaggatgtggcaggacc

SEQ ID NO: 5144 - DNA, 20 bp, Artificial Sequence
  Description of Artificial Sequence: Synthetic oligonucleotide
agaaggatgtggcaggaccc

SEQ ID NO: 5145 - DNA, 20 bp, Artificial Sequence
  Description of Artificial Sequence: Synthetic oligonucleotide
gaaggatgtggcaggaccca

SEQ ID NO: 5146 - DNA, 20 bp, Artificial Sequence
  Description of Artificial Sequence: Synthetic oligonucleotide
aaggatgtggcaggacccag

SEQ ID NO: 5147 - DNA, 20 bp, Artificial Sequence
  Description of Artificial Sequence: Synthetic oligonucleotide
aggatgtggcaggacccagt

SEQ ID NO: 5148 - DNA, 20 bp, Artificial Sequence
  Description of Artificial Sequence: Synthetic oligonucleotide
ggatgtggcaggacccagtg

SEQ ID NO: 5149 - DNA, 20 bp, Artificial Sequence
  Description of Artificial Sequence: Synthetic oligonucleotide
gatgtggcaggacccagtgg

SEQ ID NO: 5150 - DNA, 20 bp, Artificial Sequence
  Description of Artificial Sequence: Synthetic oligonucleotide
atgtggcaggacccagtggg

SEQ ID NO: 5151 - DNA, 20 bp, Artificial Sequence
  Description of Artificial Sequence: Synthetic oligonucleotide
tgtggcaggacccagtgggt

SEQ ID NO: 5152 - DNA, 20 bp, Artificial Sequence
  Description of Artificial Sequence: Synthetic oligonucleotide
gtggcaggacccagtgggtt

SEQ ID NO: 5153 - DNA, 20 bp, Artificial Sequence
  Description of Artificial Sequence: Synthetic oligonucleotide
tggcaggacccagtgggttt

SEQ ID NO: 5154 - DNA, 20 bp, Artificial Sequence
  Description of Artificial Sequence: Synthetic oligonucleotide
ggcaggacccagtgggttta

SEQ ID NO: 5155 - DNA, 20 bp, Artificial Sequence
  Description of Artificial Sequence: Synthetic oligonucleotide
gcaggacccagtgggtttaa

SEQ ID NO: 5156 - DNA, 20 bp, Artificial Sequence
  Description of Artificial Sequence: Synthetic oligonucleotide
caggacccagtgggtttaaa

SEQ ID NO: 5157 - DNA, 20 bp, Artificial Sequence
  Description of Artificial Sequence: Synthetic oligonucleotide
aggacccagtgggtttaaat

SEQ ID NO: 5158 - DNA, 20 bp, Artificial Sequence
  Description of Artificial Sequence: Synthetic oligonucleotide
ggacccagtgggtttaaata

SEQ ID NO: 5159 - DNA, 20 bp, Artificial Sequence
  Description of Artificial Sequence: Synthetic oligonucleotide
gacccagtgggtttaaatag

SEQ ID NO: 5160 - DNA, 20 bp, Artificial Sequence
  Description of Artificial Sequence: Synthetic oligonucleotide
acccagtgggtttaaatagt

SEQ ID NO: 5161 - DNA, 20 bp, Artificial Sequence
  Description of Artificial Sequence: Synthetic oligonucleotide
cccagtgggtttaaatagtt

SEQ ID NO: 5162 - DNA, 20 bp, Artificial Sequence
  Description of Artificial Sequence: Synthetic oligonucleotide
ccagtgggtttaaatagttc

SEQ ID NO: 5163 - DNA, 20 bp, Artificial Sequence
  Description of Artificial Sequence: Synthetic oligonucleotide
cagtgggtttaaatagttca

SEQ ID NO: 5164 - DNA, 20 bp, Artificial Sequence
  Description of Artificial Sequence: Synthetic oligonucleotide
agtgggtttaaatagttcat

SEQ ID NO: 5165 - DNA, 20 bp, Artificial Sequence
  Description of Artificial Sequence: Synthetic oligonucleotide
gtgggtttaaatagttcatc

SEQ ID NO: 5166 - DNA, 20 bp, Artificial Sequence
  Description of Artificial Sequence: Synthetic oligonucleotide
tgggtttaaatagttcatcc

SEQ ID NO: 5167 - DNA, 20 bp, Artificial Sequence
  Description of Artificial Sequence: Synthetic oligonucleotide
gggtttaaatagttcatcct

SEQ ID NO: 5168 - DNA, 20 bp, Artificial Sequence
  Description of Artificial Sequence: Synthetic oligonucleotide
ggtttaaatagttcatcctg

SEQ ID NO: 5169 - DNA, 20 bp, Artificial Sequence
  Description of Artificial Sequence: Synthetic oligonucleotide
gtttaaatagttcatcctgt

SEQ ID NO: 5170 - DNA, 20 bp, Artificial Sequence
  Description of Artificial Sequence: Synthetic oligonucleotide
tttaaatagttcatcctgtt

SEQ ID NO: 5171 - DNA, 20 bp, Artificial Sequence
  Description of Artificial Sequence: Synthetic oligonucleotide
ttaaatagttcatcctgttt

SEQ ID NO: 5172 - DNA, 20 bp, Artificial Sequence
  Description of Artificial Sequence: Synthetic oligonucleotide
taaatagttcatcctgttta

SEQ ID NO: 5173 - DNA, 20 bp, Artificial Sequence
  Description of Artificial Sequence: Synthetic oligonucleotide
aaatagttcatcctgtttac

SEQ ID NO: 5174 - DNA, 20 bp, Artificial Sequence
  Description of Artificial Sequence: Synthetic oligonucleotide
aatagttcatcctgtttact

SEQ ID NO: 5175 - DNA, 20 bp, Artificial Sequence
  Description of Artificial Sequence: Synthetic oligonucleotide
atagttcatcctgtttactg

SEQ ID NO: 5176 - DNA, 20 bp, Artificial Sequence
  Description of Artificial Sequence: Synthetic oligonucleotide
tagttcatcctgtttactgt

SEQ ID NO: 5177 - DNA, 20 bp, Artificial Sequence
  Description of Artificial Sequence: Synthetic oligonucleotide
agttcatcctgtttactgta

SEQ ID NO: 5178 - DNA, 20 bp, Artificial Sequence
  Description of Artificial Sequence: Synthetic oligonucleotide
gttcatcctgtttactgtaa

SEQ ID NO: 5179 - DNA, 20 bp, Artificial Sequence
  Description of Artificial Sequence: Synthetic oligonucleotide
ttcatcctgtttactgtaac

SEQ ID NO: 5180 - DNA, 20 bp, Artificial Sequence
  Description of Artificial Sequence: Synthetic oligonucleotide
tcatcctgtttactgtaaca

SEQ ID NO: 5181 - DNA, 20 bp, Artificial Sequence
  Description of Artificial Sequence: Synthetic oligonucleotide
catcctgtttactgtaacat

SEQ ID NO: 5182 - DNA, 20 bp, Artificial Sequence
  Description of Artificial Sequence: Synthetic oligonucleotide
atcctgtttactgtaacatc

SEQ ID NO: 5183 - DNA, 20 bp, Artificial Sequence
  Description of Artificial Sequence: Synthetic oligonucleotide
tcctgtttactgtaacatcc

SEQ ID NO: 5184 - DNA, 20 bp, Artificial Sequence
  Description of Artificial Sequence: Synthetic oligonucleotide
cctgtttactgtaacatcct

SEQ ID NO: 5185 - DNA, 20 bp, Artificial Sequence
  Description of Artificial Sequence: Synthetic oligonucleotide
ctgtttactgtaacatcctt

SEQ ID NO: 5186 - DNA, 20 bp, Artificial Sequence
  Description of Artificial Sequence: Synthetic oligonucleotide
tgtttactgtaacatccttg

SEQ ID NO: 5187 - DNA, 20 bp, Artificial Sequence
  Description of Artificial Sequence: Synthetic oligonucleotide
gtttactgtaacatccttgg

SEQ ID NO: 5188 - DNA, 20 bp, Artificial Sequence
  Description of Artificial Sequence: Synthetic oligonucleotide
tttactgtaacatccttggt

SEQ ID NO: 5189 - DNA, 20 bp, Artificial Sequence
  Description of Artificial Sequence: Synthetic oligonucleotide
ttactgtaacatccttggta

SEQ ID NO: 5190 - DNA, 20 bp, Artificial Sequence
  Description of Artificial Sequence: Synthetic oligonucleotide
tactgtaacatccttggtac

SEQ ID NO: 5191 - DNA, 20 bp, Artificial Sequence
  Description of Artificial Sequence: Synthetic oligonucleotide
actgtaacatccttggtaca

SEQ ID NO: 5192 - DNA, 20 bp, Artificial Sequence
  Description of Artificial Sequence: Synthetic oligonucleotide
ctgtaacatccttggtacat

SEQ ID NO: 5193 - DNA, 20 bp, Artificial Sequence
  Description of Artificial Sequence: Synthetic oligonucleotide
tgtaacatccttggtacata

SEQ ID NO: 5194 - DNA, 20 bp, Artificial Sequence
  Description of Artificial Sequence: Synthetic oligonucleotide
gtaacatccttggtacatat

SEQ ID NO: 5195 - DNA, 20 bp, Artificial Sequence
  Description of Artificial Sequence: Synthetic oligonucleotide
taacatccttggtacatatg

SEQ ID NO: 5196 - DNA, 20 bp, Artificial Sequence
  Description of Artificial Sequence: Synthetic oligonucleotide
aacatccttggtacatatga

SEQ ID NO: 5197 - DNA, 20 bp, Artificial Sequence
  Description of Artificial Sequence: Synthetic oligonucleotide
acatccttggtacatatgat

SEQ ID NO: 5198 - DNA, 20 bp, Artificial Sequence
  Description of Artificial Sequence: Synthetic oligonucleotide
catccttggtacatatgatt

SEQ ID NO: 5199 - DNA, 20 bp, Artificial Sequence
  Description of Artificial Sequence: Synthetic oligonucleotide
atccttggtacatatgattt

SEQ ID NO: 5200 - DNA, 20 bp, Artificial Sequence
  Description of Artificial Sequence: Synthetic oligonucleotide
tccttggtacatatgatttt

SEQ ID NO: 5201 - DNA, 20 bp, Artificial Sequence
  Description of Artificial Sequence: Synthetic oligonucleotide
ccttggtacatatgattttt

SEQ ID NO: 5202 - DNA, 20 bp, Artificial Sequence
  Description of Artificial Sequence: Synthetic oligonucleotide
cttggtacatatgatttttt

SEQ ID NO: 5203 - DNA, 20 bp, Artificial Sequence
  Description of Artificial Sequence: Synthetic oligonucleotide
ttggtacatatgattttttt

SEQ ID NO: 5204 - DNA, 20 bp, Artificial Sequence
  Description of Artificial Sequence: Synthetic oligonucleotide
tggtacatatgatttttttg

SEQ ID NO: 5205 - DNA, 20 bp, Artificial Sequence
  Description of Artificial Sequence: Synthetic oligonucleotide
ggtacatatgatttttttgt

SEQ ID NO: 5206 - DNA, 20 bp, Artificial Sequence
  Description of Artificial Sequence: Synthetic oligonucleotide
gtacatatgatttttttgtg

SEQ ID NO: 5207 - DNA, 20 bp, Artificial Sequence
  Description of Artificial Sequence: Synthetic oligonucleotide
tacatatgatttttttgtgc

SEQ ID NO: 5208 - DNA, 20 bp, Artificial Sequence
  Description of Artificial Sequence: Synthetic oligonucleotide
acatatgatttttttgtgct

SEQ ID NO: 5209 - DNA, 20 bp, Artificial Sequence
  Description of Artificial Sequence: Synthetic oligonucleotide
catatgatttttttgtgctc

SEQ ID NO: 5210 - DNA, 20 bp, Artificial Sequence
  Description of Artificial Sequence: Synthetic oligonucleotide
atatgatttttttgtgctcc

SEQ ID NO: 5211 - DNA, 20 bp, Artificial Sequence
  Description of Artificial Sequence: Synthetic oligonucleotide
tatgatttttttgtgctcct

SEQ ID NO: 5212 - DNA, 20 bp, Artificial Sequence
  Description of Artificial Sequence: Synthetic oligonucleotide
atgatttttttgtgctcctt

SEQ ID NO: 5213 - DNA, 20 bp, Artificial Sequence
  Description of Artificial Sequence: Synthetic oligonucleotide
tgatttttttgtgctccttg

SEQ ID NO: 5214 - DNA, 20 bp, Artificial Sequence
  Description of Artificial Sequence: Synthetic oligonucleotide
gatttttttgtgctccttgg

SEQ ID NO: 5215 - DNA, 20 bp, Artificial Sequence
  Description of Artificial Sequence: Synthetic oligonucleotide
atttttttgtgctccttgga

SEQ ID NO: 5216 - DNA, 20 bp, Artificial Sequence
  Description of Artificial Sequence: Synthetic oligonucleotide
tttttttgtgctccttggag

SEQ ID NO: 5217 - DNA, 20 bp, Artificial Sequence
  Description of Artificial Sequence: Synthetic oligonucleotide
ttttttgtgctccttggaga

SEQ ID NO: 5218 - DNA, 20 bp, Artificial Sequence
  Description of Artificial Sequence: Synthetic oligonucleotide
tttttgtgctccttggagac

SEQ ID NO: 5219 - DNA, 20 bp, Artificial Sequence
  Description of Artificial Sequence: Synthetic oligonucleotide
ttttgtgctccttggagact

SEQ ID NO: 5220 - DNA, 20 bp, Artificial Sequence
  Description of Artificial Sequence: Synthetic oligonucleotide
tttgtgctccttggagactt

SEQ ID NO: 5221 - DNA, 20 bp, Artificial Sequence
  Description of Artificial Sequence: Synthetic oligonucleotide
ttgtgctccttggagactta

SEQ ID NO: 5222 - DNA, 20 bp, Artificial Sequence
  Description of Artificial Sequence: Synthetic oligonucleotide
tgtgctccttggagacttat

SEQ ID NO: 5223 - DNA, 20 bp, Artificial Sequence
  Description of Artificial Sequence: Synthetic oligonucleotide
gtgctccttggagacttatt

SEQ ID NO: 5224 - DNA, 20 bp, Artificial Sequence
  Description of Artificial Sequence: Synthetic oligonucleotide
tgctccttggagacttattc

SEQ ID NO: 5225 - DNA, 20 bp, Artificial Sequence
  Description of Artificial Sequence: Synthetic oligonucleotide
gctccttggagacttattct

SEQ ID NO: 5226 - DNA, 20 bp, Artificial Sequence
  Description of Artificial Sequence: Synthetic oligonucleotide
ctccttggagacttattctt

SEQ ID NO: 5227 - DNA, 20 bp, Artificial Sequence
  Description of Artificial Sequence: Synthetic oligonucleotide
tccttggagacttattcttt

SEQ ID NO: 5228 - DNA, 20 bp, Artificial Sequence
  Description of Artificial Sequence: Synthetic oligonucleotide
ccttggagacttattctttc

SEQ ID NO: 5229 - DNA, 20 bp, Artificial Sequence
  Description of Artificial Sequence: Synthetic oligonucleotide
cttggagacttattctttct

SEQ ID NO: 5230 - DNA, 20 bp, Artificial Sequence
  Description of Artificial Sequence: Synthetic oligonucleotide
ttggagacttattctttctt

SEQ ID NO: 5231 - DNA, 20 bp, Artificial Sequence
  Description of Artificial Sequence: Synthetic oligonucleotide
tggagacttattctttcttt

SEQ ID NO: 5232 - DNA, 20 bp, Artificial Sequence
  Description of Artificial Sequence: Synthetic oligonucleotide
ggagacttattctttctttg

SEQ ID NO: 5233 - DNA, 20 bp, Artificial Sequence
  Description of Artificial Sequence: Synthetic oligonucleotide
gagacttattctttctttgg

SEQ ID NO: 5234 - DNA, 20 bp, Artificial Sequence
  Description of Artificial Sequence: Synthetic oligonucleotide
agacttattctttctttgga

SEQ ID NO: 5235 - DNA, 20 bp, Artificial Sequence
  Description of Artificial Sequence: Synthetic oligonucleotide
gacttattctttctttggag

SEQ ID NO: 5236 - DNA, 20 bp, Artificial Sequence
  Description of Artificial Sequence: Synthetic oligonucleotide
acttattctttctttggaga

SEQ ID NO: 5237 - DNA, 20 bp, Artificial Sequence
  Description of Artificial Sequence: Synthetic oligonucleotide
cttattctttctttggagat

SEQ ID NO: 5238 - DNA, 20 bp, Artificial Sequence
  Description of Artificial Sequence: Synthetic oligonucleotide
ttattctttctttggagatt

SEQ ID NO: 5239 - DNA, 20 bp, Artificial Sequence
  Description of Artificial Sequence: Synthetic oligonucleotide
tattctttctttggagatta

SEQ ID NO: 5240 - DNA, 20 bp, Artificial Sequence
  Description of Artificial Sequence: Synthetic oligonucleotide
attctttctttggagattat

SEQ ID NO: 5241 - DNA, 20 bp, Artificial Sequence
  Description of Artificial Sequence: Synthetic oligonucleotide
ttctttctttggagattata

SEQ ID NO: 5242 - DNA, 20 bp, Artificial Sequence
  Description of Artificial Sequence: Synthetic oligonucleotide
tctttctttggagattatag

SEQ ID NO: 5243 - DNA, 20 bp, Artificial Sequence
  Description of Artificial Sequence: Synthetic oligonucleotide
ctttctttggagattatagg

SEQ ID NO: 5244 - DNA, 20 bp, Artificial Sequence
  Description of Artificial Sequence: Synthetic oligonucleotide
tttctttggagattataggc

SEQ ID NO: 5245 - DNA, 20 bp, Artificial Sequence
  Description of Artificial Sequence: Synthetic oligonucleotide
ttctttggagattataggct

SEQ ID NO: 5246 - DNA, 20 bp, Artificial Sequence
  Description of Artificial Sequence: Synthetic oligonucleotide
tctttggagattataggctg

SEQ ID NO: 5247 - DNA, 20 bp, Artificial Sequence
  Description of Artificial Sequence: Synthetic oligonucleotide
ctttggagattataggctgt

SEQ ID NO: 5248 - DNA, 20 bp, Artificial Sequence
  Description of Artificial Sequence: Synthetic oligonucleotide
tttggagattataggctgtt

SEQ ID NO: 5249 - DNA, 20 bp, Artificial Sequence
  Description of Artificial Sequence: Synthetic oligonucleotide
ttggagattataggctgttt

SEQ ID NO: 5250 - DNA, 20 bp, Artificial Sequence
  Description of Artificial Sequence: Synthetic oligonucleotide
tggagattataggctgtttc

SEQ ID NO: 5251 - DNA, 20 bp, Artificial Sequence
  Description of Artificial Sequence: Synthetic oligonucleotide
ggagattataggctgtttct

SEQ ID NO: 5252 - DNA, 20 bp, Artificial Sequence
  Description of Artificial Sequence: Synthetic oligonucleotide
gagattataggctgtttctc

SEQ ID NO: 5253 - DNA, 20 bp, Artificial Sequence
  Description of Artificial Sequence: Synthetic oligonucleotide
agattataggctgtttctca

SEQ ID NO: 5254 - DNA, 20 bp, Artificial Sequence
  Description of Artificial Sequence: Synthetic oligonucleotide
gattataggctgtttctcag

SEQ ID NO: 5255 - DNA, 20 bp, Artificial Sequence
  Description of Artificial Sequence: Synthetic oligonucleotide
attataggctgtttctcagt

SEQ ID NO: 5256 - DNA, 20 bp, Artificial Sequence
  Description of Artificial Sequence: Synthetic oligonucleotide
ttataggctgtttctcagtc

SEQ ID NO: 5257 - DNA, 20 bp, Artificial Sequence
  Description of Artificial Sequence: Synthetic oligonucleotide
tataggctgtttctcagtcc

SEQ ID NO: 5258 - DNA, 20 bp, Artificial Sequence
  Description of Artificial Sequence: Synthetic oligonucleotide
ataggctgtttctcagtcct

SEQ ID NO: 5259 - DNA, 20 bp, Artificial Sequence
  Description of Artificial Sequence: Synthetic oligonucleotide
taggctgtttctcagtccta

SEQ ID NO: 5260 - DNA, 20 bp, Artificial Sequence
  Description of Artificial Sequence: Synthetic oligonucleotide
aggctgtttctcagtcctac

SEQ ID NO: 5261 - DNA, 20 bp, Artificial Sequence
  Description of Artificial Sequence: Synthetic oligonucleotide
ggctgtttctcagtcctacc

SEQ ID NO: 5262 - DNA, 20 bp, Artificial Sequence
  Description of Artificial Sequence: Synthetic oligonucleotide
gctgtttctcagtcctaccc

SEQ ID NO: 5263 - DNA, 20 bp, Artificial Sequence
  Description of Artificial Sequence: Synthetic oligonucleotide
ctgtttctcagtcctaccct

SEQ ID NO: 5264 - DNA, 20 bp, Artificial Sequence
  Description of Artificial Sequence: Synthetic oligonucleotide
tgtttctcagtcctaccctt

SEQ ID NO: 5265 - DNA, 20 bp, Artificial Sequence
  Description of Artificial Sequence: Synthetic oligonucleotide
gtttctcagtcctacccttt

SEQ ID NO: 5266 - DNA, 20 bp, Artificial Sequence
  Description of Artificial Sequence: Synthetic oligonucleotide
tttctcagtcctaccctttc

SEQ ID NO: 5267 - DNA, 20 bp, Artificial Sequence
  Description of Artificial Sequence: Synthetic oligonucleotide
ttctcagtcctaccctttct

SEQ ID NO: 5268 - DNA, 20 bp, Artificial Sequence
  Description of Artificial Sequence: Synthetic oligonucleotide
tctcagtcctaccctttcta

SEQ ID NO: 5269 - DNA, 20 bp, Artificial Sequence
  Description of Artificial Sequence: Synthetic oligonucleotide
ctcagtcctaccctttctaa

SEQ ID NO: 5270 - DNA, 20 bp, Artificial Sequence
  Description of Artificial Sequence: Synthetic oligonucleotide
tcagtcctaccctttctaac

SEQ ID NO: 5271 - DNA, 20 bp, Artificial Sequence
  Description of Artificial Sequence: Synthetic oligonucleotide
cagtcctaccctttctaaca

SEQ ID NO: 5272 - DNA, 20 bp, Artificial Sequence
  Description of Artificial Sequence: Synthetic oligonucleotide
agtcctaccctttctaacac

SEQ ID NO: 5273 - DNA, 20 bp, Artificial Sequence
  Description of Artificial Sequence: Synthetic oligonucleotide
gtcctaccctttctaacact

SEQ ID NO: 5274 - DNA, 20 bp, Artificial Sequence
  Description of Artificial Sequence: Synthetic oligonucleotide
tcctaccctttctaacactc

SEQ ID NO: 5275 - DNA, 20 bp, Artificial Sequence
  Description of Artificial Sequence: Synthetic oligonucleotide
cctaccctttctaacactct

SEQ ID NO: 5276 - DNA, 20 bp, Artificial Sequence
  Description of Artificial Sequence: Synthetic oligonucleotide
ctaccctttctaacactctc

SEQ ID NO: 5277 - DNA, 20 bp, Artificial Sequence
  Description of Artificial Sequence: Synthetic oligonucleotide
taccctttctaacactctct

SEQ ID NO: 5278 - DNA, 20 bp, Artificial Sequence
  Description of Artificial Sequence: Synthetic oligonucleotide
accctttctaacactctctt

SEQ ID NO: 5279 - DNA, 20 bp, Artificial Sequence
  Description of Artificial Sequence: Synthetic oligonucleotide
ccctttctaacactctcttc

SEQ ID NO: 5280 - DNA, 20 bp, Artificial Sequence
  Description of Artificial Sequence: Synthetic oligonucleotide
cctttctaacactctcttcc

SEQ ID NO: 5281 - DNA, 20 bp, Artificial Sequence
  Description of Artificial Sequence: Synthetic oligonucleotide
ctttctaacactctcttcct

SEQ ID NO: 5282 - DNA, 20 bp, Artificial Sequence
  Description of Artificial Sequence: Synthetic oligonucleotide
tttctaacactctcttcctg

SEQ ID NO: 5283 - DNA, 20 bp, Artificial Sequence
  Description of Artificial Sequence: Synthetic oligonucleotide
ttctaacactctcttcctgt

SEQ ID NO: 5284 - DNA, 20 bp, Artificial Sequence
  Description of Artificial Sequence: Synthetic oligonucleotide
tctaacactctcttcctgtc

SEQ ID NO: 5285 - DNA, 20 bp, Artificial Sequence
  Description of Artificial Sequence: Synthetic oligonucleotide
ctaacactctcttcctgtcc

SEQ ID NO: 5286 - DNA, 20 bp, Artificial Sequence
  Description of Artificial Sequence: Synthetic oligonucleotide
taacactctcttcctgtcct

SEQ ID NO: 5287 - DNA, 20 bp, Artificial Sequence
  Description of Artificial Sequence: Synthetic oligonucleotide
aacactctcttcctgtcctc

SEQ ID NO: 5288 - DNA, 20 bp, Artificial Sequence
  Description of Artificial Sequence: Synthetic oligonucleotide
acactctcttcctgtcctca

SEQ ID NO: 5289 - DNA, 20 bp, Artificial Sequence
  Description of Artificial Sequence: Synthetic oligonucleotide
cactctcttcctgtcctcat

SEQ ID NO: 5290 - DNA, 20 bp, Artificial Sequence
  Description of Artificial Sequence: Synthetic oligonucleotide
actctcttcctgtcctcatc

SEQ ID NO: 5291 - DNA, 20 bp, Artificial Sequence
  Description of Artificial Sequence: Synthetic oligonucleotide
ctctcttcctgtcctcatct

SEQ ID NO: 5292 - DNA, 20 bp, Artificial Sequence
  Description of Artificial Sequence: Synthetic oligonucleotide
tctcttcctgtcctcatctg

SEQ ID NO: 5293 - DNA, 20 bp, Artificial Sequence
  Description of Artificial Sequence: Synthetic oligonucleotide
ctcttcctgtcctcatctgc

SEQ ID NO: 5294 - DNA, 20 bp, Artificial Sequence
  Description of Artificial Sequence: Synthetic oligonucleotide
tcttcctgtcctcatctgcc

SEQ ID NO: 5295 - DNA, 20 bp, Artificial Sequence
  Description of Artificial Sequence: Synthetic oligonucleotide
cttcctgtcctcatctgccc

SEQ ID NO: 5296 - DNA, 20 bp, Artificial Sequence
  Description of Artificial Sequence: Synthetic oligonucleotide
ttcctgtcctcatctgccct

SEQ ID NO: 5297 - DNA, 20 bp, Artificial Sequence
  Description of Artificial Sequence: Synthetic oligonucleotide
tcctgtcctcatctgccctc

SEQ ID NO: 5298 - DNA, 20 bp, Artificial Sequence
  Description of Artificial Sequence: Synthetic oligonucleotide
cctgtcctcatctgccctca

SEQ ID NO: 5299 - DNA, 20 bp, Artificial Sequence
  Description of Artificial Sequence: Synthetic oligonucleotide
ctgtcctcatctgccctcat

SEQ ID NO: 5300 - DNA, 20 bp, Artificial Sequence
  Description of Artificial Sequence: Synthetic oligonucleotide
tgtcctcatctgccctcatc

SEQ ID NO: 5301 - DNA, 20 bp, Artificial Sequence
  Description of Artificial Sequence: Synthetic oligonucleotide
gtcctcatctgccctcatcc

SEQ ID NO: 5302 - DNA, 20 bp, Artificial Sequence
  Description of Artificial Sequence: Synthetic oligonucleotide
tcctcatctgccctcatcca

SEQ ID NO: 5303 - DNA, 20 bp, Artificial Sequence
  Description of Artificial Sequence: Synthetic oligonucleotide
cctcatctgccctcatccag

SEQ ID NO: 5304 - DNA, 20 bp, Artificial Sequence
  Description of Artificial Sequence: Synthetic oligonucleotide
ctcatctgccctcatccagt

SEQ ID NO: 5305 - DNA, 20 bp, Artificial Sequence
  Description of Artificial Sequence: Synthetic oligonucleotide
tcatctgccctcatccagtc

SEQ ID NO: 5306 - DNA, 20 bp, Artificial Sequence
  Description of Artificial Sequence: Synthetic oligonucleotide
catctgccctcatccagtct

SEQ ID NO: 5307 - DNA, 20 bp, Artificial Sequence
  Description of Artificial Sequence: Synthetic oligonucleotide
atctgccctcatccagtctc

SEQ ID NO: 5308 - DNA, 20 bp, Artificial Sequence
  Description of Artificial Sequence: Synthetic oligonucleotide
tctgccctcatccagtctcc

SEQ ID NO: 5309 - DNA, 20 bp, Artificial Sequence
  Description of Artificial Sequence: Synthetic oligonucleotide
ctgccctcatccagtctcca

SEQ ID NO: 5310 - DNA, 20 bp, Artificial Sequence
  Description of Artificial Sequence: Synthetic oligonucleotide
tgccctcatccagtctccac

SEQ ID NO: 5311 - DNA, 20 bp, Artificial Sequence
  Description of Artificial Sequence: Synthetic oligonucleotide
gccctcatccagtctccacg

SEQ ID NO: 5312 - DNA, 20 bp, Artificial Sequence
  Description of Artificial Sequence: Synthetic oligonucleotide
ccctcatccagtctccacgt

SEQ ID NO: 5313 - DNA, 20 bp, Artificial Sequence
  Description of Artificial Sequence: Synthetic oligonucleotide
cctcatccagtctccacgtg

SEQ ID NO: 5314 - DNA, 20 bp, Artificial Sequence
  Description of Artificial Sequence: Synthetic oligonucleotide
ctcatccagtctccacgtgt

SEQ ID NO: 5315 - DNA, 20 bp, Artificial Sequence
  Description of Artificial Sequence: Synthetic oligonucleotide
tcatccagtctccacgtgtc

SEQ ID NO: 5316 - DNA, 20 bp, Artificial Sequence
  Description of Artificial Sequence: Synthetic oligonucleotide
catccagtctccacgtgtct

SEQ ID NO: 5317 - DNA, 20 bp, Artificial Sequence
  Description of Artificial Sequence: Synthetic oligonucleotide
atccagtctccacgtgtctc

SEQ ID NO: 5318 - DNA, 20 bp, Artificial Sequence
  Description of Artificial Sequence: Synthetic oligonucleotide
tccagtctccacgtgtctca

SEQ ID NO: 5319 - DNA, 20 bp, Artificial Sequence
  Description of Artificial Sequence: Synthetic oligonucleotide
ccagtctccacgtgtctcag

SEQ ID NO: 5320 - DNA, 20 bp, Artificial Sequence
  Description of Artificial Sequence: Synthetic oligonucleotide
cagtctccacgtgtctcagt

SEQ ID NO: 5321 - DNA, 20 bp, Artificial Sequence
  Description of Artificial Sequence: Synthetic oligonucleotide
agtctccacgtgtctcagtt

SEQ ID NO: 5322 - DNA, 20 bp, Artificial Sequence
  Description of Artificial Sequence: Synthetic oligonucleotide
gtctccacgtgtctcagttt

SEQ ID NO: 5323 - DNA, 20 bp, Artificial Sequence
  Description of Artificial Sequence: Synthetic oligonucleotide
tctccacgtgtctcagtttc

SEQ ID NO: 5324 - DNA, 20 bp, Artificial Sequence
  Description of Artificial Sequence: Synthetic oligonucleotide
ctccacgtgtctcagtttct

SEQ ID NO: 5325 - DNA, 20 bp, Artificial Sequence
  Description of Artificial Sequence: Synthetic oligonucleotide
tccacgtgtctcagtttctg

SEQ ID NO: 5326 - DNA, 20 bp, Artificial Sequence
  Description of Artificial Sequence: Synthetic oligonucleotide
ccacgtgtctcagtttctgt

SEQ ID NO: 5327 - DNA, 20 bp, Artificial Sequence
  Description of Artificial Sequence: Synthetic oligonucleotide
cacgtgtctcagtttctgta

SEQ ID NO: 5328 - DNA, 20 bp, Artificial Sequence
  Description of Artificial Sequence: Synthetic oligonucleotide
acgtgtctcagtttctgtat

SEQ ID NO: 5329 - DNA, 20 bp, Artificial Sequence
  Description of Artificial Sequence: Synthetic oligonucleotide
cgtgtctcagtttctgtatc

SEQ ID NO: 5330 - DNA, 20 bp, Artificial Sequence
  Description of Artificial Sequence: Synthetic oligonucleotide
gtgtctcagtttctgtatcc

SEQ ID NO: 5331 - DNA, 20 bp, Artificial Sequence
  Description of Artificial Sequence: Synthetic oligonucleotide
tgtctcagtttctgtatccg

SEQ ID NO: 5332 - DNA, 20 bp, Artificial Sequence
  Description of Artificial Sequence: Synthetic oligonucleotide
gtctcagtttctgtatccgt

SEQ ID NO: 5333 - DNA, 20 bp, Artificial Sequence
  Description of Artificial Sequence: Synthetic oligonucleotide
tctcagtttctgtatccgtg

SEQ ID NO: 5334 - DNA, 20 bp, Artificial Sequence
  Description of Artificial Sequence: Synthetic oligonucleotide
ctcagtttctgtatccgtgc

SEQ ID NO: 5335 - DNA, 20 bp, Artificial Sequence
  Description of Artificial Sequence: Synthetic oligonucleotide
tcagtttctgtatccgtgct

SEQ ID NO: 5336 - DNA, 20 bp, Artificial Sequence
  Description of Artificial Sequence: Synthetic oligonucleotide
cagtttctgtatccgtgctc

SEQ ID NO: 5337 - DNA, 20 bp, Artificial Sequence
  Description of Artificial Sequence: Synthetic oligonucleotide
agtttctgtatccgtgctcc

SEQ ID NO: 5338 - DNA, 20 bp, Artificial Sequence
  Description of Artificial Sequence: Synthetic oligonucleotide
gtttctgtatccgtgctcca

SEQ ID NO: 5339 - DNA, 20 bp, Artificial Sequence
  Description of Artificial Sequence: Synthetic oligonucleotide
tttctgtatccgtgctccac

SEQ ID NO: 5340 - DNA, 20 bp, Artificial Sequence
  Description of Artificial Sequence: Synthetic oligonucleotide
ttctgtatccgtgctccacg

SEQ ID NO: 5341 - DNA, 20 bp, Artificial Sequence
  Description of Artificial Sequence: Synthetic oligonucleotide
tctgtatccgtgctccacgg

SEQ ID NO: 5342 - DNA, 20 bp, Artificial Sequence
  Description of Artificial Sequence: Synthetic oligonucleotide
ctgtatccgtgctccacggc

SEQ ID NO: 5343 - DNA, 20 bp, Artificial Sequence
  Description of Artificial Sequence: Synthetic oligonucleotide
tgtatccgtgctccacggca

SEQ ID NO: 5344 - DNA, 20 bp, Artificial Sequence
  Description of Artificial Sequence: Synthetic oligonucleotide
gtatccgtgctccacggcag

SEQ ID NO: 5345 - DNA, 20 bp, Artificial Sequence
  Description of Artificial Sequence: Synthetic oligonucleotide
tatccgtgctccacggcagc

SEQ ID NO: 5346 - DNA, 20 bp, Artificial Sequence
  Description of Artificial Sequence: Synthetic oligonucleotide
atccgtgctccacggcagcc

SEQ ID NO: 5347 - DNA, 20 bp, Artificial Sequence
  Description of Artificial Sequence: Synthetic oligonucleotide
tccgtgctccacggcagcct

SEQ ID NO: 5348 - DNA, 20 bp, Artificial Sequence
  Description of Artificial Sequence: Synthetic oligonucleotide
ccgtgctccacggcagcctc

SEQ ID NO: 5349 - DNA, 20 bp, Artificial Sequence
  Description of Artificial Sequence: Synthetic oligonucleotide
cgtgctccacggcagcctcc

SEQ ID NO: 5350 - DNA, 20 bp, Artificial Sequence
  Description of Artificial Sequence: Synthetic oligonucleotide
gtgctccacggcagcctcct

SEQ ID NO: 5351 - DNA, 20 bp, Artificial Sequence
  Description of Artificial Sequence: Synthetic oligonucleotide
tgctccacggcagcctcctt

SEQ ID NO: 5352 - DNA, 20 bp, Artificial Sequence
  Description of Artificial Sequence: Synthetic oligonucleotide
gctccacggcagcctccttt

SEQ ID NO: 5353 - DNA, 20 bp, Artificial Sequence
  Description of Artificial Sequence: Synthetic oligonucleotide
ctccacggcagcctcctttt

SEQ ID NO: 5354 - DNA, 20 bp, Artificial Sequence
  Description of Artificial Sequence: Synthetic oligonucleotide
tccacggcagcctcctttta

SEQ ID NO: 5355 - DNA, 20 bp, Artificial Sequence
  Description of Artificial Sequence: Synthetic oligonucleotide
ccacggcagcctccttttaa

SEQ ID NO: 5356 - DNA, 20 bp, Artificial Sequence
  Description of Artificial Sequence: Synthetic oligonucleotide
cacggcagcctccttttaag

SEQ ID NO: 5357 - DNA, 20 bp, Artificial Sequence
  Description of Artificial Sequence: Synthetic oligonucleotide
acggcagcctccttttaagg

SEQ ID NO: 5358 - DNA, 20 bp, Artificial Sequence
  Description of Artificial Sequence: Synthetic oligonucleotide
cggcagcctccttttaaggc

SEQ ID NO: 5359 - DNA, 20 bp, Artificial Sequence
  Description of Artificial Sequence: Synthetic oligonucleotide
ggcagcctccttttaaggct

SEQ ID NO: 5360 - DNA, 20 bp, Artificial Sequence
  Description of Artificial Sequence: Synthetic oligonucleotide
gcagcctccttttaaggctt

SEQ ID NO: 5361 - DNA, 20 bp, Artificial Sequence
  Description of Artificial Sequence: Synthetic oligonucleotide
cagcctccttttaaggcttg

SEQ ID NO: 5362 - DNA, 20 bp, Artificial Sequence
  Description of Artificial Sequence: Synthetic oligonucleotide
agcctccttttaaggcttga

SEQ ID NO: 5363 - DNA, 20 bp, Artificial Sequence
  Description of Artificial Sequence: Synthetic oligonucleotide
gcctccttttaaggcttgaa

SEQ ID NO: 5364 - DNA, 20 bp, Artificial Sequence
  Description of Artificial Sequence: Synthetic oligonucleotide
cctccttttaaggcttgaag

SEQ ID NO: 5365 - DNA, 20 bp, Artificial Sequence
  Description of Artificial Sequence: Synthetic oligonucleotide
ctccttttaaggcttgaagt

SEQ ID NO: 5366 - DNA, 20 bp, Artificial Sequence
  Description of Artificial Sequence: Synthetic oligonucleotide
tccttttaaggcttgaagtc

SEQ ID NO: 5367 - DNA, 20 bp, Artificial Sequence
  Description of Artificial Sequence: Synthetic oligonucleotide
ccttttaaggcttgaagtct

SEQ ID NO: 5368 - DNA, 20 bp, Artificial Sequence
  Description of Artificial Sequence: Synthetic oligonucleotide
cttttaaggcttgaagtctt

SEQ ID NO: 5369 - DNA, 20 bp, Artificial Sequence
  Description of Artificial Sequence: Synthetic oligonucleotide
ttttaaggcttgaagtcttc

SEQ ID NO: 5370 - DNA, 20 bp, Artificial Sequence
  Description of Artificial Sequence: Synthetic oligonucleotide
tttaaggcttgaagtcttct

SEQ ID NO: 5371 - DNA, 20 bp, Artificial Sequence
  Description of Artificial Sequence: Synthetic oligonucleotide
ttaaggcttgaagtcttctg

SEQ ID NO: 5372 - DNA, 20 bp, Artificial Sequence
  Description of Artificial Sequence: Synthetic oligonucleotide
taaggcttgaagtcttctgg

SEQ ID NO: 5373 - DNA, 20 bp, Artificial Sequence
  Description of Artificial Sequence: Synthetic oligonucleotide
aaggcttgaagtcttctggg

SEQ ID NO: 5374 - DNA, 20 bp, Artificial Sequence
  Description of Artificial Sequence: Synthetic oligonucleotide
aggcttgaagtcttctgggc

SEQ ID NO: 5375 - DNA, 20 bp, Artificial Sequence
  Description of Artificial Sequence: Synthetic oligonucleotide
ggcttgaagtcttctgggcg

SEQ ID NO: 5376 - DNA, 20 bp, Artificial Sequence
  Description of Artificial Sequence: Synthetic oligonucleotide
gcttgaagtcttctgggcgg

SEQ ID NO: 5377 - DNA, 20 bp, Artificial Sequence
  Description of Artificial Sequence: Synthetic oligonucleotide
cttgaagtcttctgggcgga

SEQ ID NO: 5378 - DNA, 20 bp, Artificial Sequence
  Description of Artificial Sequence: Synthetic oligonucleotide
ttgaagtcttctgggcggat

SEQ ID NO: 5379 - DNA, 20 bp, Artificial Sequence
  Description of Artificial Sequence: Synthetic oligonucleotide
tgaagtcttctgggcggatt

SEQ ID NO: 5380 - DNA, 20 bp, Artificial Sequence
  Description of Artificial Sequence: Synthetic oligonucleotide
gaagtcttctgggcggattt

SEQ ID NO: 5381 - DNA, 20 bp, Artificial Sequence
  Description of Artificial Sequence: Synthetic oligonucleotide
aagtcttctgggcggatttt

SEQ ID NO: 5382 - DNA, 20 bp, Artificial Sequence
  Description of Artificial Sequence: Synthetic oligonucleotide
agtcttctgggcggattttc

SEQ ID NO: 5383 - DNA, 20 bp, Artificial Sequence
  Description of Artificial Sequence: Synthetic oligonucleotide
gtcttctgggcggattttca

SEQ ID NO: 5384 - DNA, 20 bp, Artificial Sequence
  Description of Artificial Sequence: Synthetic oligonucleotide
tcttctgggcggattttcat

SEQ ID NO: 5385 - DNA, 20 bp, Artificial Sequence
  Description of Artificial Sequence: Synthetic oligonucleotide
cttctgggcggattttcatc

SEQ ID NO: 5386 - DNA, 20 bp, Artificial Sequence
  Description of Artificial Sequence: Synthetic oligonucleotide
ttctgggcggattttcatct

SEQ ID NO: 5387 - DNA, 20 bp, Artificial Sequence
  Description of Artificial Sequence: Synthetic oligonucleotide
tctgggcggattttcatctc

SEQ ID NO: 5388 - DNA, 20 bp, Artificial Sequence
  Description of Artificial Sequence: Synthetic oligonucleotide
ctgggcggattttcatctcc

SEQ ID NO: 5389 - DNA, 20 bp, Artificial Sequence
  Description of Artificial Sequence: Synthetic oligonucleotide
tgggcggattttcatctcca

SEQ ID NO: 5390 - DNA, 20 bp, Artificial Sequence
  Description of Artificial Sequence: Synthetic oligonucleotide
gggcggattttcatctccac

SEQ ID NO: 5391 - DNA, 20 bp, Artificial Sequence
  Description of Artificial Sequence: Synthetic oligonucleotide
ggcggattttcatctccacc

SEQ ID NO: 5392 - DNA, 20 bp, Artificial Sequence
  Description of Artificial Sequence: Synthetic oligonucleotide
gcggattttcatctccaccc

SEQ ID NO: 5393 - DNA, 20 bp, Artificial Sequence
  Description of Artificial Sequence: Synthetic oligonucleotide
cggattttcatctccacccg

SEQ ID NO: 5394 - DNA, 20 bp, Artificial Sequence
  Description of Artificial Sequence: Synthetic oligonucleotide
ggattttcatctccacccgt

SEQ ID NO: 5395 - DNA, 20 bp, Artificial Sequence
  Description of Artificial Sequence: Synthetic oligonucleotide
gattttcatctccacccgtt

SEQ ID NO: 5396 - DNA, 20 bp, Artificial Sequence
  Description of Artificial Sequence: Synthetic oligonucleotide
attttcatctccacccgttt

SEQ ID NO: 5397 - DNA, 20 bp, Artificial Sequence
  Description of Artificial Sequence: Synthetic oligonucleotide
ttttcatctccacccgtttg

SEQ ID NO: 5398 - DNA, 20 bp, Artificial Sequence
  Description of Artificial Sequence: Synthetic oligonucleotide
tttcatctccacccgtttga

SEQ ID NO: 5399 - DNA, 20 bp, Artificial Sequence
  Description of Artificial Sequence: Synthetic oligonucleotide
ttcatctccacccgtttgag

SEQ ID NO: 5400 - DNA, 20 bp, Artificial Sequence
  Description of Artificial Sequence: Synthetic oligonucleotide
tcatctccacccgtttgagg

SEQ ID NO: 5401 - DNA, 20 bp, Artificial Sequence
  Description of Artificial Sequence: Synthetic oligonucleotide
catctccacccgtttgaggg

SEQ ID NO: 5402 - DNA, 20 bp, Artificial Sequence
  Description of Artificial Sequence: Synthetic oligonucleotide
atctccacccgtttgaggga

SEQ ID NO: 5403 - DNA, 20 bp, Artificial Sequence
  Description of Artificial Sequence: Synthetic oligonucleotide
tctccacccgtttgagggag

SEQ ID NO: 5404 - DNA, 20 bp, Artificial Sequence
  Description of Artificial Sequence: Synthetic oligonucleotide
ctccacccgtttgagggagt

SEQ ID NO: 5405 - DNA, 20 bp, Artificial Sequence
  Description of Artificial Sequence: Synthetic oligonucleotide
tccacccgtttgagggagta

SEQ ID NO: 5406 - DNA, 20 bp, Artificial Sequence
  Description of Artificial Sequence: Synthetic oligonucleotide
ccacccgtttgagggagtag

SEQ ID NO: 5407 - DNA, 20 bp, Artificial Sequence
  Description of Artificial Sequence: Synthetic oligonucleotide
cacccgtttgagggagtagg

SEQ ID NO: 5408 - DNA, 20 bp, Artificial Sequence
  Description of Artificial Sequence: Synthetic oligonucleotide
acccgtttgagggagtaggt

SEQ ID NO: 5409 - DNA, 20 bp, Artificial Sequence
  Description of Artificial Sequence: Synthetic oligonucleotide
cccgtttgagggagtaggta

SEQ ID NO: 5410 - DNA, 20 bp, Artificial Sequence
  Description of Artificial Sequence: Synthetic oligonucleotide
ccgtttgagggagtaggtag

SEQ ID NO: 5411 - DNA, 20 bp, Artificial Sequence
  Description of Artificial Sequence: Synthetic oligonucleotide
cgtttgagggagtaggtaga

SEQ ID NO: 5412 - DNA, 20 bp, Artificial Sequence
  Description of Artificial Sequence: Synthetic oligonucleotide
gtttgagggagtaggtagat

SEQ ID NO: 5413 - DNA, 20 bp, Artificial Sequence
  Description of Artificial Sequence: Synthetic oligonucleotide
tttgagggagtaggtagatc

SEQ ID NO: 5414 - DNA, 20 bp, Artificial Sequence
  Description of Artificial Sequence: Synthetic oligonucleotide
ttgagggagtaggtagatcc

SEQ ID NO: 5415 - DNA, 20 bp, Artificial Sequence
  Description of Artificial Sequence: Synthetic oligonucleotide
tgagggagtaggtagatcca

SEQ ID NO: 5416 - DNA, 20 bp, Artificial Sequence
  Description of Artificial Sequence: Synthetic oligonucleotide
gagggagtaggtagatccat

SEQ ID NO: 5417 - DNA, 20 bp, Artificial Sequence
  Description of Artificial Sequence: Synthetic oligonucleotide
agggagtaggtagatccatg

SEQ ID NO: 5418 - DNA, 20 bp, Artificial Sequence
  Description of Artificial Sequence: Synthetic oligonucleotide
gggagtaggtagatccatgc

SEQ ID NO: 5419 - DNA, 20 bp, Artificial Sequence
  Description of Artificial Sequence: Synthetic oligonucleotide
ggagtaggtagatccatgcc

SEQ ID NO: 5420 - DNA, 20 bp, Artificial Sequence
  Description of Artificial Sequence: Synthetic oligonucleotide
gagtaggtagatccatgcca

SEQ ID NO: 5421 - DNA, 20 bp, Artificial Sequence
  Description of Artificial Sequence: Synthetic oligonucleotide
agtaggtagatccatgccag

SEQ ID NO: 5422 - DNA, 20 bp, Artificial Sequence
  Description of Artificial Sequence: Synthetic oligonucleotide
gtaggtagatccatgccagc

SEQ ID NO: 5423 - DNA, 20 bp, Artificial Sequence
  Description of Artificial Sequence: Synthetic oligonucleotide
taggtagatccatgccagcc

SEQ ID NO: 5424 - DNA, 20 bp, Artificial Sequence
  Description of Artificial Sequence: Synthetic oligonucleotide
aggtagatccatgccagcca

SEQ ID NO: 5425 - DNA, 20 bp, Artificial Sequence
  Description of Artificial Sequence: Synthetic oligonucleotide
ggtagatccatgccagccat

SEQ ID NO: 5426 - DNA, 20 bp, Artificial Sequence
  Description of Artificial Sequence: Synthetic oligonucleotide
gtagatccatgccagccata

SEQ ID NO: 5427 - DNA, 20 bp, Artificial Sequence
  Description of Artificial Sequence: Synthetic oligonucleotide
tagatccatgccagccatac

SEQ ID NO: 5428 - DNA, 20 bp, Artificial Sequence
  Description of Artificial Sequence: Synthetic oligonucleotide
agatccatgccagccatacc

SEQ ID NO: 5429 - DNA, 20 bp, Artificial Sequence
  Description of Artificial Sequence: Synthetic oligonucleotide
gatccatgccagccatacca

SEQ ID NO: 5430 - DNA, 20 bp, Artificial Sequence
  Description of Artificial Sequence: Synthetic oligonucleotide
atccatgccagccataccag

SEQ ID NO: 5431 - DNA, 20 bp, Artificial Sequence
  Description of Artificial Sequence: Synthetic oligonucleotide
tccatgccagccataccagg

SEQ ID NO: 5432 - DNA, 20 bp, Artificial Sequence
  Description of Artificial Sequence: Synthetic oligonucleotide
ccatgccagccataccaggt

SEQ ID NO: 5433 - DNA, 20 bp, Artificial Sequence
  Description of Artificial Sequence: Synthetic oligonucleotide
catgccagccataccaggtg

SEQ ID NO: 5434 - DNA, 20 bp, Artificial Sequence
  Description of Artificial Sequence: Synthetic oligonucleotide
atgccagccataccaggtga

SEQ ID NO: 5435 - DNA, 20 bp, Artificial Sequence
  Description of Artificial Sequence: Synthetic oligonucleotide
tgccagccataccaggtgat

SEQ ID NO: 5436 - DNA, 20 bp, Artificial Sequence
  Description of Artificial Sequence: Synthetic oligonucleotide
gccagccataccaggtgatg

SEQ ID NO: 5437 - DNA, 20 bp, Artificial Sequence
  Description of Artificial Sequence: Synthetic oligonucleotide
ccagccataccaggtgatgc

SEQ ID NO: 5438 - DNA, 20 bp, Artificial Sequence
  Description of Artificial Sequence: Synthetic oligonucleotide
cagccataccaggtgatgcc

SEQ ID NO: 5439 - DNA, 20 bp, Artificial Sequence
  Description of Artificial Sequence: Synthetic oligonucleotide
agccataccaggtgatgcca

SEQ ID NO: 5440 - DNA, 20 bp, Artificial Sequence
  Description of Artificial Sequence: Synthetic oligonucleotide
gccataccaggtgatgccat

SEQ ID NO: 5441 - DNA, 20 bp, Artificial Sequence
  Description of Artificial Sequence: Synthetic oligonucleotide
ccataccaggtgatgccatc

SEQ ID NO: 5442 - DNA, 20 bp, Artificial Sequence
  Description of Artificial Sequence: Synthetic oligonucleotide
cataccaggtgatgccatcc

SEQ ID NO: 5443 - DNA, 20 bp, Artificial Sequence
  Description of Artificial Sequence: Synthetic oligonucleotide
ataccaggtgatgccatcca

SEQ ID NO: 5444 - DNA, 20 bp, Artificial Sequence
  Description of Artificial Sequence: Synthetic oligonucleotide
taccaggtgatgccatccag

SEQ ID NO: 5445 - DNA, 20 bp, Artificial Sequence
  Description of Artificial Sequence: Synthetic oligonucleotide
accaggtgatgccatccagg

SEQ ID NO: 5446 - DNA, 20 bp, Artificial Sequence
  Description of Artificial Sequence: Synthetic oligonucleotide
ccaggtgatgccatccaggt

SEQ ID NO: 5447 - DNA, 20 bp, Artificial Sequence
  Description of Artificial Sequence: Synthetic oligonucleotide
caggtgatgccatccaggtg

SEQ ID NO: 5448 - DNA, 20 bp, Artificial Sequence
  Description of Artificial Sequence: Synthetic oligonucleotide
aggtgatgccatccaggtgc

SEQ ID NO: 5449 - DNA, 20 bp, Artificial Sequence
  Description of Artificial Sequence: Synthetic oligonucleotide
ggtgatgccatccaggtgct

SEQ ID NO: 5450 - DNA, 20 bp, Artificial Sequence
  Description of Artificial Sequence: Synthetic oligonucleotide
gtgatgccatccaggtgctt

SEQ ID NO: 5451 - DNA, 20 bp, Artificial Sequence
  Description of Artificial Sequence: Synthetic oligonucleotide
tgatgccatccaggtgctta

SEQ ID NO: 5452 - DNA, 20 bp, Artificial Sequence
  Description of Artificial Sequence: Synthetic oligonucleotide
gatgccatccaggtgcttat

SEQ ID NO: 5453 - DNA, 20 bp, Artificial Sequence
  Description of Artificial Sequence: Synthetic oligonucleotide
atgccatccaggtgcttatt

SEQ ID NO: 5454 - DNA, 20 bp, Artificial Sequence
  Description of Artificial Sequence: Synthetic oligonucleotide
tgccatccaggtgcttattg

SEQ ID NO: 5455 - DNA, 20 bp, Artificial Sequence
  Description of Artificial Sequence: Synthetic oligonucleotide
gccatccaggtgcttattgt

SEQ ID NO: 5456 - DNA, 20 bp, Artificial Sequence
  Description of Artificial Sequence: Synthetic oligonucleotide
ccatccaggtgcttattgtg

SEQ ID NO: 5457 - DNA, 20 bp, Artificial Sequence
  Description of Artificial Sequence: Synthetic oligonucleotide
catccaggtgcttattgtgc

SEQ ID NO: 5458 - DNA, 20 bp, Artificial Sequence
  Description of Artificial Sequence: Synthetic oligonucleotide
atccaggtgcttattgtgct

SEQ ID NO: 5459 - DNA, 20 bp, Artificial Sequence
  Description of Artificial Sequence: Synthetic oligonucleotide
tccaggtgcttattgtgctc

SEQ ID NO: 5460 - DNA, 20 bp, Artificial Sequence
  Description of Artificial Sequence: Synthetic oligonucleotide
ccaggtgcttattgtgctca

SEQ ID NO: 5461 - DNA, 20 bp, Artificial Sequence
  Description of Artificial Sequence: Synthetic oligonucleotide
caggtgcttattgtgctcac

SEQ ID NO: 5462 - DNA, 20 bp, Artificial Sequence
  Description of Artificial Sequence: Synthetic oligonucleotide
aggtgcttattgtgctcacc

SEQ ID NO: 5463 - DNA, 20 bp, Artificial Sequence
  Description of Artificial Sequence: Synthetic oligonucleotide
ggtgcttattgtgctcaccc

SEQ ID NO: 5464 - DNA, 20 bp, Artificial Sequence
  Description of Artificial Sequence: Synthetic oligonucleotide
gtgcttattgtgctcaccca

SEQ ID NO: 5465 - DNA, 20 bp, Artificial Sequence
  Description of Artificial Sequence: Synthetic oligonucleotide
tgcttattgtgctcacccag

SEQ ID NO: 5466 - DNA, 20 bp, Artificial Sequence
  Description of Artificial Sequence: Synthetic oligonucleotide
gcttattgtgctcacccagg

SEQ ID NO: 5467 - DNA, 20 bp, Artificial Sequence
  Description of Artificial Sequence: Synthetic oligonucleotide
cttattgtgctcacccaggc

SEQ ID NO: 5468 - DNA, 20 bp, Artificial Sequence
  Description of Artificial Sequence: Synthetic oligonucleotide
ttattgtgctcacccaggcg

SEQ ID NO: 5469 - DNA, 20 bp, Artificial Sequence
  Description of Artificial Sequence: Synthetic oligonucleotide
tattgtgctcacccaggcgg

SEQ ID NO: 5470 - DNA, 20 bp, Artificial Sequence
  Description of Artificial Sequence: Synthetic oligonucleotide
attgtgctcacccaggcggt

SEQ ID NO: 5471 - DNA, 20 bp, Artificial Sequence
  Description of Artificial Sequence: Synthetic oligonucleotide
ttgtgctcacccaggcggta

SEQ ID NO: 5472 - DNA, 20 bp, Artificial Sequence
  Description of Artificial Sequence: Synthetic oligonucleotide
tgtgctcacccaggcggtag

SEQ ID NO: 5473 - DNA, 20 bp, Artificial Sequence
  Description of Artificial Sequence: Synthetic oligonucleotide
gtgctcacccaggcggtagt

SEQ ID NO: 5474 - DNA, 20 bp, Artificial Sequence
  Description of Artificial Sequence: Synthetic oligonucleotide
tgctcacccaggcggtagta

SEQ ID NO: 5475 - DNA, 20 bp, Artificial Sequence
  Description of Artificial Sequence: Synthetic oligonucleotide
gctcacccaggcggtagtac

SEQ ID NO: 5476 - DNA, 20 bp, Artificial Sequence
  Description of Artificial Sequence: Synthetic oligonucleotide
ctcacccaggcggtagtaca

SEQ ID NO: 5477 - DNA, 20 bp, Artificial Sequence
  Description of Artificial Sequence: Synthetic oligonucleotide
tcacccaggcggtagtacac

SEQ ID NO: 5478 - DNA, 20 bp, Artificial Sequence
  Description of Artificial Sequence: Synthetic oligonucleotide
cacccaggcggtagtacact

SEQ ID NO: 5479 - DNA, 20 bp, Artificial Sequence
  Description of Artificial Sequence: Synthetic oligonucleotide
acccaggcggtagtacactc

SEQ ID NO: 5480 - DNA, 20 bp, Artificial Sequence
  Description of Artificial Sequence: Synthetic oligonucleotide
cccaggcggtagtacactcc

SEQ ID NO: 5481 - DNA, 20 bp, Artificial Sequence
  Description of Artificial Sequence: Synthetic oligonucleotide
ccaggcggtagtacactcca

SEQ ID NO: 5482 - DNA, 20 bp, Artificial Sequence
  Description of Artificial Sequence: Synthetic oligonucleotide
caggcggtagtacactccat

SEQ ID NO: 5483 - DNA, 20 bp, Artificial Sequence
  Description of Artificial Sequence: Synthetic oligonucleotide
aggcggtagtacactccatt

SEQ ID NO: 5484 - DNA, 20 bp, Artificial Sequence
  Description of Artificial Sequence: Synthetic oligonucleotide
ggcggtagtacactccattg

SEQ ID NO: 5485 - DNA, 20 bp, Artificial Sequence
  Description of Artificial Sequence: Synthetic oligonucleotide
gcggtagtacactccattga

SEQ ID NO: 5486 - DNA, 20 bp, Artificial Sequence
  Description of Artificial Sequence: Synthetic oligonucleotide
cggtagtacactccattgag

SEQ ID NO: 5487 - DNA, 20 bp, Artificial Sequence
  Description of Artificial Sequence: Synthetic oligonucleotide
ggtagtacactccattgagg

SEQ ID NO: 5488 - DNA, 20 bp, Artificial Sequence
  Description of Artificial Sequence: Synthetic oligonucleotide
gtagtacactccattgaggt

SEQ ID NO: 5489 - DNA, 20 bp, Artificial Sequence
  Description of Artificial Sequence: Synthetic oligonucleotide
tagtacactccattgaggtt

SEQ ID NO: 5490 - DNA, 20 bp, Artificial Sequence
  Description of Artificial Sequence: Synthetic oligonucleotide
agtacactccattgaggttg

SEQ ID NO: 5491 - DNA, 20 bp, Artificial Sequence
  Description of Artificial Sequence: Synthetic oligonucleotide
gtacactccattgaggttgg

SEQ ID NO: 5492 - DNA, 20 bp, Artificial Sequence
  Description of Artificial Sequence: Synthetic oligonucleotide
tacactccattgaggttgga

SEQ ID NO: 5493 - DNA, 20 bp, Artificial Sequence
  Description of Artificial Sequence: Synthetic oligonucleotide
acactccattgaggttggag

SEQ ID NO: 5494 - DNA, 20 bp, Artificial Sequence
  Description of Artificial Sequence: Synthetic oligonucleotide
cactccattgaggttggagt

SEQ ID NO: 5495 - DNA, 20 bp, Artificial Sequence
  Description of Artificial Sequence: Synthetic oligonucleotide
actccattgaggttggagtc

SEQ ID NO: 5496 - DNA, 20 bp, Artificial Sequence
  Description of Artificial Sequence: Synthetic oligonucleotide
ctccattgaggttggagtct

SEQ ID NO: 5497 - DNA, 20 bp, Artificial Sequence
  Description of Artificial Sequence: Synthetic oligonucleotide
tccattgaggttggagtctg

SEQ ID NO: 5498 - DNA, 20 bp, Artificial Sequence
  Description of Artificial Sequence: Synthetic oligonucleotide
ccattgaggttggagtctgt

SEQ ID NO: 5499 - DNA, 20 bp, Artificial Sequence
  Description of Artificial Sequence: Synthetic oligonucleotide
cattgaggttggagtctgtg

SEQ ID NO: 5500 - DNA, 20 bp, Artificial Sequence
  Description of Artificial Sequence: Synthetic oligonucleotide
attgaggttggagtctgtgc

SEQ ID NO: 5501 - DNA, 20 bp, Artificial Sequence
  Description of Artificial Sequence: Synthetic oligonucleotide
ttgaggttggagtctgtgca

SEQ ID NO: 5502 - DNA, 20 bp, Artificial Sequence
  Description of Artificial Sequence: Synthetic oligonucleotide
tgaggttggagtctgtgcag

SEQ ID NO: 5503 - DNA, 20 bp, Artificial Sequence
  Description of Artificial Sequence: Synthetic oligonucleotide
gaggttggagtctgtgcagc

SEQ ID NO: 5504 - DNA, 20 bp, Artificial Sequence
  Description of Artificial Sequence: Synthetic oligonucleotide
aggttggagtctgtgcagca

SEQ ID NO: 5505 - DNA, 20 bp, Artificial Sequence
  Description of Artificial Sequence: Synthetic oligonucleotide
ggttggagtctgtgcagcag

SEQ ID NO: 5506 - DNA, 20 bp, Artificial Sequence
  Description of Artificial Sequence: Synthetic oligonucleotide
gttggagtctgtgcagcagt

SEQ ID NO: 5507 - DNA, 20 bp, Artificial Sequence
  Description of Artificial Sequence: Synthetic oligonucleotide
ttggagtctgtgcagcagtt

SEQ ID NO: 5508 - DNA, 20 bp, Artificial Sequence
  Description of Artificial Sequence: Synthetic oligonucleotide
tggagtctgtgcagcagttg

SEQ ID NO: 5509 - DNA, 20 bp, Artificial Sequence
  Description of Artificial Sequence: Synthetic oligonucleotide
ggagtctgtgcagcagttgt

SEQ ID NO: 5510 - DNA, 20 bp, Artificial Sequence
  Description of Artificial Sequence: Synthetic oligonucleotide
gagtctgtgcagcagttgta

SEQ ID NO: 5511 - DNA, 20 bp, Artificial Sequence
  Description of Artificial Sequence: Synthetic oligonucleotide
agtctgtgcagcagttgtac

SEQ ID NO: 5512 - DNA, 20 bp, Artificial Sequence
  Description of Artificial Sequence: Synthetic oligonucleotide
gtctgtgcagcagttgtacc

SEQ ID NO: 5513 - DNA, 20 bp, Artificial Sequence
  Description of Artificial Sequence: Synthetic oligonucleotide
tctgtgcagcagttgtacca

SEQ ID NO: 5514 - DNA, 20 bp, Artificial Sequence
  Description of Artificial Sequence: Synthetic oligonucleotide
ctgtgcagcagttgtaccag

SEQ ID NO: 5515 - DNA, 20 bp, Artificial Sequence
  Description of Artificial Sequence: Synthetic oligonucleotide
tgtgcagcagttgtaccagt

SEQ ID NO: 5516 - DNA, 20 bp, Artificial Sequence
  Description of Artificial Sequence: Synthetic oligonucleotide
gtgcagcagttgtaccagta

SEQ ID NO: 5517 - DNA, 20 bp, Artificial Sequence
  Description of Artificial Sequence: Synthetic oligonucleotide
tgcagcagttgtaccagtag

SEQ ID NO: 5518 - DNA, 20 bp, Artificial Sequence
  Description of Artificial Sequence: Synthetic oligonucleotide
gcagcagttgtaccagtagc

SEQ ID NO: 5519 - DNA, 20 bp, Artificial Sequence
  Description of Artificial Sequence: Synthetic oligonucleotide
cagcagttgtaccagtagcc

SEQ ID NO: 5520 - DNA, 20 bp, Artificial Sequence
  Description of Artificial Sequence: Synthetic oligonucleotide
agcagttgtaccagtagcca

SEQ ID NO: 5521 - DNA, 20 bp, Artificial Sequence
  Description of Artificial Sequence: Synthetic oligonucleotide
gcagttgtaccagtagccac

SEQ ID NO: 5522 - DNA, 20 bp, Artificial Sequence
  Description of Artificial Sequence: Synthetic oligonucleotide
cagttgtaccagtagccacc

SEQ ID NO: 5523 - DNA, 20 bp, Artificial Sequence
  Description of Artificial Sequence: Synthetic oligonucleotide
agttgtaccagtagccacct

SEQ ID NO: 5524 - DNA, 20 bp, Artificial Sequence
  Description of Artificial Sequence: Synthetic oligonucleotide
gttgtaccagtagccacctg

SEQ ID NO: 5525 - DNA, 20 bp, Artificial Sequence
  Description of Artificial Sequence: Synthetic oligonucleotide
ttgtaccagtagccacctgg

SEQ ID NO: 5526 - DNA, 20 bp, Artificial Sequence
  Description of Artificial Sequence: Synthetic oligonucleotide
tgtaccagtagccacctggc

SEQ ID NO: 5527 - DNA, 20 bp, Artificial Sequence
  Description of Artificial Sequence: Synthetic oligonucleotide
gtaccagtagccacctggca

SEQ ID NO: 5528 - DNA, 20 bp, Artificial Sequence
  Description of Artificial Sequence: Synthetic oligonucleotide
taccagtagccacctggcat

SEQ ID NO: 5529 - DNA, 20 bp, Artificial Sequence
  Description of Artificial Sequence: Synthetic oligonucleotide
accagtagccacctggcatg

SEQ ID NO: 5530 - DNA, 20 bp, Artificial Sequence
  Description of Artificial Sequence: Synthetic oligonucleotide
ccagtagccacctggcatga

SEQ ID NO: 5531 - DNA, 20 bp, Artificial Sequence
  Description of Artificial Sequence: Synthetic oligonucleotide
cagtagccacctggcatgag

SEQ ID NO: 5532 - DNA, 20 bp, Artificial Sequence
  Description of Artificial Sequence: Synthetic oligonucleotide
agtagccacctggcatgaga

SEQ ID NO: 5533 - DNA, 20 bp, Artificial Sequence
  Description of Artificial Sequence: Synthetic oligonucleotide
gtagccacctggcatgagaa

SEQ ID NO: 5534 - DNA, 20 bp, Artificial Sequence
  Description of Artificial Sequence: Synthetic oligonucleotide
tagccacctggcatgagaaa

SEQ ID NO: 5535 - DNA, 20 bp, Artificial Sequence
  Description of Artificial Sequence: Synthetic oligonucleotide
agccacctggcatgagaaac

SEQ ID NO: 5536 - DNA, 20 bp, Artificial Sequence
  Description of Artificial Sequence: Synthetic oligonucleotide
gccacctggcatgagaaaca

SEQ ID NO: 5537 - DNA, 20 bp, Artificial Sequence
  Description of Artificial Sequence: Synthetic oligonucleotide
ccacctggcatgagaaacag

SEQ ID NO: 5538 - DNA, 20 bp, Artificial Sequence
  Description of Artificial Sequence: Synthetic oligonucleotide
cacctggcatgagaaacaga

SEQ ID NO: 5539 - DNA, 20 bp, Artificial Sequence
  Description of Artificial Sequence: Synthetic oligonucleotide
acctggcatgagaaacagac

SEQ ID NO: 5540 - DNA, 20 bp, Artificial Sequence
  Description of Artificial Sequence: Synthetic oligonucleotide
cctggcatgagaaacagacc

SEQ ID NO: 5541 - DNA, 20 bp, Artificial Sequence
  Description of Artificial Sequence: Synthetic oligonucleotide
ctggcatgagaaacagaccc

SEQ ID NO: 5542 - DNA, 20 bp, Artificial Sequence
  Description of Artificial Sequence: Synthetic oligonucleotide
tggcatgagaaacagaccca

SEQ ID NO: 5543 - DNA, 20 bp, Artificial Sequence
  Description of Artificial Sequence: Synthetic oligonucleotide
ggcatgagaaacagacccag

SEQ ID NO: 5544 - DNA, 20 bp, Artificial Sequence
  Description of Artificial Sequence: Synthetic oligonucleotide
gcatgagaaacagacccagt

SEQ ID NO: 5545 - DNA, 20 bp, Artificial Sequence
  Description of Artificial Sequence: Synthetic oligonucleotide
catgagaaacagacccagtg

SEQ ID NO: 5546 - DNA, 20 bp, Artificial Sequence
  Description of Artificial Sequence: Synthetic oligonucleotide
atgagaaacagacccagtgc

SEQ ID NO: 5547 - DNA, 20 bp, Artificial Sequence
  Description of Artificial Sequence: Synthetic oligonucleotide
tgagaaacagacccagtgct

SEQ ID NO: 5548 - DNA, 20 bp, Artificial Sequence
  Description of Artificial Sequence: Synthetic oligonucleotide
gagaaacagacccagtgcta

SEQ ID NO: 5549 - DNA, 20 bp, Artificial Sequence
  Description of Artificial Sequence: Synthetic oligonucleotide
agaaacagacccagtgctag

SEQ ID NO: 5550 - DNA, 20 bp, Artificial Sequence
  Description of Artificial Sequence: Synthetic oligonucleotide
gaaacagacccagtgctagt

SEQ ID NO: 5551 - DNA, 20 bp, Artificial Sequence
  Description of Artificial Sequence: Synthetic oligonucleotide
aaacagacccagtgctagta

SEQ ID NO: 5552 - DNA, 20 bp, Artificial Sequence
  Description of Artificial Sequence: Synthetic oligonucleotide
aacagacccagtgctagtaa

SEQ ID NO: 5553 - DNA, 20 bp, Artificial Sequence
  Description of Artificial Sequence: Synthetic oligonucleotide
acagacccagtgctagtaag

SEQ ID NO: 5554 - DNA, 20 bp, Artificial Sequence
  Description of Artificial Sequence: Synthetic oligonucleotide
cagacccagtgctagtaagt

SEQ ID NO: 5555 - DNA, 20 bp, Artificial Sequence
  Description of Artificial Sequence: Synthetic oligonucleotide
agacccagtgctagtaagtt

SEQ ID NO: 5556 - DNA, 20 bp, Artificial Sequence
  Description of Artificial Sequence: Synthetic oligonucleotide
gacccagtgctagtaagttg

SEQ ID NO: 5557 - DNA, 20 bp, Artificial Sequence
  Description of Artificial Sequence: Synthetic oligonucleotide
acccagtgctagtaagttga

SEQ ID NO: 5558 - DNA, 20 bp, Artificial Sequence
  Description of Artificial Sequence: Synthetic oligonucleotide
cccagtgctagtaagttgac

SEQ ID NO: 5559 - DNA, 20 bp, Artificial Sequence
  Description of Artificial Sequence: Synthetic oligonucleotide
ccagtgctagtaagttgact

SEQ ID NO: 5560 - DNA, 20 bp, Artificial Sequence
  Description of Artificial Sequence: Synthetic oligonucleotide
cagtgctagtaagttgactg

SEQ ID NO: 5561 - DNA, 20 bp, Artificial Sequence
  Description of Artificial Sequence: Synthetic oligonucleotide
agtgctagtaagttgactgt

SEQ ID NO: 5562 - DNA, 20 bp, Artificial Sequence
  Description of Artificial Sequence: Synthetic oligonucleotide
gtgctagtaagttgactgtg

SEQ ID NO: 5563 - DNA, 20 bp, Artificial Sequence
  Description of Artificial Sequence: Synthetic oligonucleotide
tgctagtaagttgactgtga

SEQ ID NO: 5564 - DNA, 20 bp, Artificial Sequence
  Description of Artificial Sequence: Synthetic oligonucleotide
gctagtaagttgactgtgat

SEQ ID NO: 5565 - DNA, 20 bp, Artificial Sequence
  Description of Artificial Sequence: Synthetic oligonucleotide
ctagtaagttgactgtgata

SEQ ID NO: 5566 - DNA, 20 bp, Artificial Sequence
  Description of Artificial Sequence: Synthetic oligonucleotide
tagtaagttgactgtgatag

SEQ ID NO: 5567 - DNA, 20 bp, Artificial Sequence
  Description of Artificial Sequence: Synthetic oligonucleotide
agtaagttgactgtgataga

SEQ ID NO: 5568 - DNA, 20 bp, Artificial Sequence
  Description of Artificial Sequence: Synthetic oligonucleotide
gtaagttgactgtgatagac

SEQ ID NO: 5569 - DNA, 20 bp, Artificial Sequence
  Description of Artificial Sequence: Synthetic oligonucleotide
taagttgactgtgatagacc

SEQ ID NO: 5570 - DNA, 20 bp, Artificial Sequence
  Description of Artificial Sequence: Synthetic oligonucleotide
aagttgactgtgatagacca

SEQ ID NO: 5571 - DNA, 20 bp, Artificial Sequence
  Description of Artificial Sequence: Synthetic oligonucleotide
agttgactgtgatagaccag

SEQ ID NO: 5572 - DNA, 20 bp, Artificial Sequence
  Description of Artificial Sequence: Synthetic oligonucleotide
gttgactgtgatagaccaga

SEQ ID NO: 5573 - DNA, 20 bp, Artificial Sequence
  Description of Artificial Sequence: Synthetic oligonucleotide
ttgactgtgatagaccagac

SEQ ID NO: 5574 - DNA, 20 bp, Artificial Sequence
  Description of Artificial Sequence: Synthetic oligonucleotide
tgactgtgatagaccagaca

SEQ ID NO: 5575 - DNA, 20 bp, Artificial Sequence
  Description of Artificial Sequence: Synthetic oligonucleotide
gactgtgatagaccagacat

SEQ ID NO: 5576 - DNA, 20 bp, Artificial Sequence
  Description of Artificial Sequence: Synthetic oligonucleotide
actgtgatagaccagacatc

SEQ ID NO: 5577 - DNA, 20 bp, Artificial Sequence
  Description of Artificial Sequence: Synthetic oligonucleotide
ctgtgatagaccagacatca

SEQ ID NO: 5578 - DNA, 20 bp, Artificial Sequence
  Description of Artificial Sequence: Synthetic oligonucleotide
tgtgatagaccagacatcag

SEQ ID NO: 5579 - DNA, 20 bp, Artificial Sequence
  Description of Artificial Sequence: Synthetic oligonucleotide
gtgatagaccagacatcagg

SEQ ID NO: 5580 - DNA, 20 bp, Artificial Sequence
  Description of Artificial Sequence: Synthetic oligonucleotide
tgatagaccagacatcaggt

SEQ ID NO: 5581 - DNA, 20 bp, Artificial Sequence
  Description of Artificial Sequence: Synthetic oligonucleotide
gatagaccagacatcaggta

SEQ ID NO: 5582 - DNA, 20 bp, Artificial Sequence
  Description of Artificial Sequence: Synthetic oligonucleotide
atagaccagacatcaggtaa

SEQ ID NO: 5583 - DNA, 20 bp, Artificial Sequence
  Description of Artificial Sequence: Synthetic oligonucleotide
tagaccagacatcaggtaag

SEQ ID NO: 5584 - DNA, 20 bp, Artificial Sequence
  Description of Artificial Sequence: Synthetic oligonucleotide
agaccagacatcaggtaagg

SEQ ID NO: 5585 - DNA, 20 bp, Artificial Sequence
  Description of Artificial Sequence: Synthetic oligonucleotide
gaccagacatcaggtaagga

SEQ ID NO: 5586 - DNA, 20 bp, Artificial Sequence
  Description of Artificial Sequence: Synthetic oligonucleotide
accagacatcaggtaaggag

SEQ ID NO: 5587 - DNA, 20 bp, Artificial Sequence
  Description of Artificial Sequence: Synthetic oligonucleotide
ccagacatcaggtaaggagt

SEQ ID NO: 5588 - DNA, 20 bp, Artificial Sequence
  Description of Artificial Sequence: Synthetic oligonucleotide
cagacatcaggtaaggagtt

SEQ ID NO: 5589 - DNA, 20 bp, Artificial Sequence
  Description of Artificial Sequence: Synthetic oligonucleotide
agacatcaggtaaggagtta

SEQ ID NO: 5590 - DNA, 20 bp, Artificial Sequence
  Description of Artificial Sequence: Synthetic oligonucleotide
gacatcaggtaaggagttag

SEQ ID NO: 5591 - DNA, 20 bp, Artificial Sequence
  Description of Artificial Sequence: Synthetic oligonucleotide
acatcaggtaaggagttaga

SEQ ID NO: 5592 - DNA, 20 bp, Artificial Sequence
  Description of Artificial Sequence: Synthetic oligonucleotide
catcaggtaaggagttagag

SEQ ID NO: 5593 - DNA, 20 bp, Artificial Sequence
  Description of Artificial Sequence: Synthetic oligonucleotide
atcaggtaaggagttagagc

SEQ ID NO: 5594 - DNA, 20 bp, Artificial Sequence
  Description of Artificial Sequence: Synthetic oligonucleotide
tcaggtaaggagttagagcc

SEQ ID NO: 5595 - DNA, 20 bp, Artificial Sequence
  Description of Artificial Sequence: Synthetic oligonucleotide
caggtaaggagttagagcca

SEQ ID NO: 5596 - DNA, 20 bp, Artificial Sequence
  Description of Artificial Sequence: Synthetic oligonucleotide
aggtaaggagttagagccag

SEQ ID NO: 5597 - DNA, 20 bp, Artificial Sequence
  Description of Artificial Sequence: Synthetic oligonucleotide
ggtaaggagttagagccagg

SEQ ID NO: 5598 - DNA, 20 bp, Artificial Sequence
  Description of Artificial Sequence: Synthetic oligonucleotide
gtaaggagttagagccaggg

SEQ ID NO: 5599 - DNA, 20 bp, Artificial Sequence
  Description of Artificial Sequence: Synthetic oligonucleotide
taaggagttagagccagggt

SEQ ID NO: 5600 - DNA, 20 bp, Artificial Sequence
  Description of Artificial Sequence: Synthetic oligonucleotide
aaggagttagagccagggtc

SEQ ID NO: 5601 - DNA, 20 bp, Artificial Sequence
  Description of Artificial Sequence: Synthetic oligonucleotide
aggagttagagccagggtca

SEQ ID NO: 5602 - DNA, 20 bp, Artificial Sequence
  Description of Artificial Sequence: Synthetic oligonucleotide
ggagttagagccagggtcag

SEQ ID NO: 5603 - DNA, 20 bp, Artificial Sequence
  Description of Artificial Sequence: Synthetic oligonucleotide
gagttagagccagggtcaga

SEQ ID NO: 5604 - DNA, 20 bp, Artificial Sequence
  Description of Artificial Sequence: Synthetic oligonucleotide
agttagagccagggtcagaa

SEQ ID NO: 5605 - DNA, 20 bp, Artificial Sequence
  Description of Artificial Sequence: Synthetic oligonucleotide
gttagagccagggtcagaaa

SEQ ID NO: 5606 - DNA, 20 bp, Artificial Sequence
  Description of Artificial Sequence: Synthetic oligonucleotide
ttagagccagggtcagaaag

SEQ ID NO: 5607 - DNA, 20 bp, Artificial Sequence
  Description of Artificial Sequence: Synthetic oligonucleotide
tagagccagggtcagaaaga

SEQ ID NO: 5608 - DNA, 20 bp, Artificial Sequence
  Description of Artificial Sequence: Synthetic oligonucleotide
agagccagggtcagaaagaa

SEQ ID NO: 5609 - DNA, 20 bp, Artificial Sequence
  Description of Artificial Sequence: Synthetic oligonucleotide
gagccagggtcagaaagaat

SEQ ID NO: 5610 - DNA, 20 bp, Artificial Sequence
  Description of Artificial Sequence: Synthetic oligonucleotide
agccagggtcagaaagaata

SEQ ID NO: 5611 - DNA, 20 bp, Artificial Sequence
  Description of Artificial Sequence: Synthetic oligonucleotide
gccagggtcagaaagaatac

SEQ ID NO: 5612 - DNA, 20 bp, Artificial Sequence
  Description of Artificial Sequence: Synthetic oligonucleotide
ccagggtcagaaagaatacc

SEQ ID NO: 5613 - DNA, 20 bp, Artificial Sequence
  Description of Artificial Sequence: Synthetic oligonucleotide
cagggtcagaaagaatacca

SEQ ID NO: 5614 - DNA, 20 bp, Artificial Sequence
  Description of Artificial Sequence: Synthetic oligonucleotide
agggtcagaaagaataccaa

SEQ ID NO: 5615 - DNA, 20 bp, Artificial Sequence
  Description of Artificial Sequence: Synthetic oligonucleotide
gggtcagaaagaataccaaa

SEQ ID NO: 5616 - DNA, 20 bp, Artificial Sequence
  Description of Artificial Sequence: Synthetic oligonucleotide
ggtcagaaagaataccaaaa

SEQ ID NO: 5617 - DNA, 20 bp, Artificial Sequence
  Description of Artificial Sequence: Synthetic oligonucleotide
gtcagaaagaataccaaaac

SEQ ID NO: 5618 - DNA, 20 bp, Artificial Sequence
  Description of Artificial Sequence: Synthetic oligonucleotide
tcagaaagaataccaaaacc

SEQ ID NO: 5619 - DNA, 20 bp, Artificial Sequence
  Description of Artificial Sequence: Synthetic oligonucleotide
cagaaagaataccaaaaccg

SEQ ID NO: 5620 - DNA, 20 bp, Artificial Sequence
  Description of Artificial Sequence: Synthetic oligonucleotide
agaaagaataccaaaaccgg

SEQ ID NO: 5621 - DNA, 20 bp, Artificial Sequence
  Description of Artificial Sequence: Synthetic oligonucleotide
gaaagaataccaaaaccgga

SEQ ID NO: 5622 - DNA, 20 bp, Artificial Sequence
  Description of Artificial Sequence: Synthetic oligonucleotide
aaagaataccaaaaccggaa

SEQ ID NO: 5623 - DNA, 20 bp, Artificial Sequence
  Description of Artificial Sequence: Synthetic oligonucleotide
aagaataccaaaaccggaat

SEQ ID NO: 5624 - DNA, 20 bp, Artificial Sequence
  Description of Artificial Sequence: Synthetic oligonucleotide
agaataccaaaaccggaata

SEQ ID NO: 5625 - DNA, 20 bp, Artificial Sequence
  Description of Artificial Sequence: Synthetic oligonucleotide
gaataccaaaaccggaatat

SEQ ID NO: 5626 - DNA, 20 bp, Artificial Sequence
  Description of Artificial Sequence: Synthetic oligonucleotide
aataccaaaaccggaatatc

SEQ ID NO: 5627 - DNA, 20 bp, Artificial Sequence
  Description of Artificial Sequence: Synthetic oligonucleotide
ataccaaaaccggaatatca

SEQ ID NO: 5628 - DNA, 20 bp, Artificial Sequence
  Description of Artificial Sequence: Synthetic oligonucleotide
taccaaaaccggaatatcaa

SEQ ID NO: 5629 - DNA, 20 bp, Artificial Sequence
  Description of Artificial Sequence: Synthetic oligonucleotide
accaaaaccggaatatcaac

SEQ ID NO: 5630 - DNA, 20 bp, Artificial Sequence
  Description of Artificial Sequence: Synthetic oligonucleotide
ccaaaaccggaatatcaact

SEQ ID NO: 5631 - DNA, 20 bp, Artificial Sequence
  Description of Artificial Sequence: Synthetic oligonucleotide
caaaaccggaatatcaactg

SEQ ID NO: 5632 - DNA, 20 bp, Artificial Sequence
  Description of Artificial Sequence: Synthetic oligonucleotide
aaaaccggaatatcaactgt

SEQ ID NO: 5633 - DNA, 20 bp, Artificial Sequence
  Description of Artificial Sequence: Synthetic oligonucleotide
aaaccggaatatcaactgta

SEQ ID NO: 5634 - DNA, 20 bp, Artificial Sequence
  Description of Artificial Sequence: Synthetic oligonucleotide
aaccggaatatcaactgtac

SEQ ID NO: 5635 - DNA, 20 bp, Artificial Sequence
  Description of Artificial Sequence: Synthetic oligonucleotide
accggaatatcaactgtaca

SEQ ID NO: 5636 - DNA, 20 bp, Artificial Sequence
  Description of Artificial Sequence: Synthetic oligonucleotide
ccggaatatcaactgtacag

SEQ ID NO: 5637 - DNA, 20 bp, Artificial Sequence
  Description of Artificial Sequence: Synthetic oligonucleotide
cggaatatcaactgtacagt

SEQ ID NO: 5638 - DNA, 20 bp, Artificial Sequence
  Description of Artificial Sequence: Synthetic oligonucleotide
ggaatatcaactgtacagtt

SEQ ID NO: 5639 - DNA, 20 bp, Artificial Sequence
  Description of Artificial Sequence: Synthetic oligonucleotide
gaatatcaactgtacagtta

SEQ ID NO: 5640 - DNA, 20 bp, Artificial Sequence
  Description of Artificial Sequence: Synthetic oligonucleotide
aatatcaactgtacagttat

SEQ ID NO: 5641 - DNA, 20 bp, Artificial Sequence
  Description of Artificial Sequence: Synthetic oligonucleotide
atatcaactgtacagttata

SEQ ID NO: 5642 - DNA, 20 bp, Artificial Sequence
  Description of Artificial Sequence: Synthetic oligonucleotide
tatcaactgtacagttataa

SEQ ID NO: 5643 - DNA, 20 bp, Artificial Sequence
  Description of Artificial Sequence: Synthetic oligonucleotide
atcaactgtacagttataat

SEQ ID NO: 5644 - DNA, 20 bp, Artificial Sequence
  Description of Artificial Sequence: Synthetic oligonucleotide
tcaactgtacagttataatt

SEQ ID NO: 5645 - DNA, 20 bp, Artificial Sequence
  Description of Artificial Sequence: Synthetic oligonucleotide
caactgtacagttataattc

SEQ ID NO: 5646 - DNA, 20 bp, Artificial Sequence
  Description of Artificial Sequence: Synthetic oligonucleotide
aactgtacagttataattca

SEQ ID NO: 5647 - DNA, 20 bp, Artificial Sequence
  Description of Artificial Sequence: Synthetic oligonucleotide
actgtacagttataattcac

SEQ ID NO: 5648 - DNA, 20 bp, Artificial Sequence
  Description of Artificial Sequence: Synthetic oligonucleotide
ctgtacagttataattcact

SEQ ID NO: 5649 - DNA, 20 bp, Artificial Sequence
  Description of Artificial Sequence: Synthetic oligonucleotide
tgtacagttataattcactc

SEQ ID NO: 5650 - DNA, 20 bp, Artificial Sequence
  Description of Artificial Sequence: Synthetic oligonucleotide
gtacagttataattcactct

SEQ ID NO: 5651 - DNA, 20 bp, Artificial Sequence
  Description of Artificial Sequence: Synthetic oligonucleotide
tacagttataattcactctt

SEQ ID NO: 5652 - DNA, 20 bp, Artificial Sequence
  Description of Artificial Sequence: Synthetic oligonucleotide
acagttataattcactcttt

SEQ ID NO: 5653 - DNA, 20 bp, Artificial Sequence
  Description of Artificial Sequence: Synthetic oligonucleotide
cagttataattcactctttc

SEQ ID NO: 5654 - DNA, 20 bp, Artificial Sequence
  Description of Artificial Sequence: Synthetic oligonucleotide
agttataattcactctttct

SEQ ID NO: 5655 - DNA, 20 bp, Artificial Sequence
  Description of Artificial Sequence: Synthetic oligonucleotide
gttataattcactctttctc

SEQ ID NO: 5656 - DNA, 20 bp, Artificial Sequence
  Description of Artificial Sequence: Synthetic oligonucleotide
ttataattcactctttctcc

SEQ ID NO: 5657 - DNA, 20 bp, Artificial Sequence
  Description of Artificial Sequence: Synthetic oligonucleotide
tataattcactctttctcct

SEQ ID NO: 5658 - DNA, 20 bp, Artificial Sequence
  Description of Artificial Sequence: Synthetic oligonucleotide
ataattcactctttctcctc

SEQ ID NO: 5659 - DNA, 20 bp, Artificial Sequence
  Description of Artificial Sequence: Synthetic oligonucleotide
taattcactctttctcctca

SEQ ID NO: 5660 - DNA, 20 bp, Artificial Sequence
  Description of Artificial Sequence: Synthetic oligonucleotide
aattcactctttctcctcaa

SEQ ID NO: 5661 - DNA, 20 bp, Artificial Sequence
  Description of Artificial Sequence: Synthetic oligonucleotide
attcactctttctcctcaag

SEQ ID NO: 5662 - DNA, 20 bp, Artificial Sequence
  Description of Artificial Sequence: Synthetic oligonucleotide
ttcactctttctcctcaagt

SEQ ID NO: 5663 - DNA, 20 bp, Artificial Sequence
  Description of Artificial Sequence: Synthetic oligonucleotide
tcactctttctcctcaagtg

SEQ ID NO: 5664 - DNA, 20 bp, Artificial Sequence
  Description of Artificial Sequence: Synthetic oligonucleotide
cactctttctcctcaagtgg

SEQ ID NO: 5665 - DNA, 20 bp, Artificial Sequence
  Description of Artificial Sequence: Synthetic oligonucleotide
actctttctcctcaagtggg

SEQ ID NO: 5666 - DNA, 20 bp, Artificial Sequence
  Description of Artificial Sequence: Synthetic oligonucleotide
ctctttctcctcaagtggga

SEQ ID NO: 5667 - DNA, 20 bp, Artificial Sequence
  Description of Artificial Sequence: Synthetic oligonucleotide
tctttctcctcaagtgggat

SEQ ID NO: 5668 - DNA, 20 bp, Artificial Sequence
  Description of Artificial Sequence: Synthetic oligonucleotide
ctttctcctcaagtgggatt

SEQ ID NO: 5669 - DNA, 20 bp, Artificial Sequence
  Description of Artificial Sequence: Synthetic oligonucleotide
tttctcctcaagtgggatta

SEQ ID NO: 5670 - DNA, 20 bp, Artificial Sequence
  Description of Artificial Sequence: Synthetic oligonucleotide
ttctcctcaagtgggattat

SEQ ID NO: 5671 - DNA, 20 bp, Artificial Sequence
  Description of Artificial Sequence: Synthetic oligonucleotide
tctcctcaagtgggattatg

SEQ ID NO: 5672 - DNA, 20 bp, Artificial Sequence
  Description of Artificial Sequence: Synthetic oligonucleotide
ctcctcaagtgggattatga

SEQ ID NO: 5673 - DNA, 20 bp, Artificial Sequence
  Description of Artificial Sequence: Synthetic oligonucleotide
tcctcaagtgggattatgag

SEQ ID NO: 5674 - DNA, 20 bp, Artificial Sequence
  Description of Artificial Sequence: Synthetic oligonucleotide
cctcaagtgggattatgagc

SEQ ID NO: 5675 - DNA, 20 bp, Artificial Sequence
  Description of Artificial Sequence: Synthetic oligonucleotide
ctcaagtgggattatgagct

SEQ ID NO: 5676 - DNA, 20 bp, Artificial Sequence
  Description of Artificial Sequence: Synthetic oligonucleotide
tcaagtgggattatgagctt

SEQ ID NO: 5677 - DNA, 20 bp, Artificial Sequence
  Description of Artificial Sequence: Synthetic oligonucleotide
caagtgggattatgagcttg

SEQ ID NO: 5678 - DNA, 20 bp, Artificial Sequence
  Description of Artificial Sequence: Synthetic oligonucleotide
aagtgggattatgagcttgt

SEQ ID NO: 5679 - DNA, 20 bp, Artificial Sequence
  Description of Artificial Sequence: Synthetic oligonucleotide
agtgggattatgagcttgta

SEQ ID NO: 5680 - DNA, 20 bp, Artificial Sequence
  Description of Artificial Sequence: Synthetic oligonucleotide
gtgggattatgagcttgtac

SEQ ID NO: 5681 - DNA, 20 bp, Artificial Sequence
  Description of Artificial Sequence: Synthetic oligonucleotide
tgggattatgagcttgtacc

SEQ ID NO: 5682 - DNA, 20 bp, Artificial Sequence
  Description of Artificial Sequence: Synthetic oligonucleotide
gggattatgagcttgtacct

SEQ ID NO: 5683 - DNA, 20 bp, Artificial Sequence
  Description of Artificial Sequence: Synthetic oligonucleotide
ggattatgagcttgtacctg

SEQ ID NO: 5684 - DNA, 20 bp, Artificial Sequence
  Description of Artificial Sequence: Synthetic oligonucleotide
gattatgagcttgtacctga

SEQ ID NO: 5685 - DNA, 20 bp, Artificial Sequence
  Description of Artificial Sequence: Synthetic oligonucleotide
attatgagcttgtacctgaa

SEQ ID NO: 5686 - DNA, 20 bp, Artificial Sequence
  Description of Artificial Sequence: Synthetic oligonucleotide
ttatgagcttgtacctgaac

SEQ ID NO: 5687 - DNA, 20 bp, Artificial Sequence
  Description of Artificial Sequence: Synthetic oligonucleotide
tatgagcttgtacctgaact

SEQ ID NO: 5688 - DNA, 20 bp, Artificial Sequence
  Description of Artificial Sequence: Synthetic oligonucleotide
atgagcttgtacctgaactt

SEQ ID NO: 5689 - DNA, 20 bp, Artificial Sequence
  Description of Artificial Sequence: Synthetic oligonucleotide
tgagcttgtacctgaacttc

SEQ ID NO: 5690 - DNA, 20 bp, Artificial Sequence
  Description of Artificial Sequence: Synthetic oligonucleotide
gagcttgtacctgaacttct

SEQ ID NO: 5691 - DNA, 20 bp, Artificial Sequence
  Description of Artificial Sequence: Synthetic oligonucleotide
agcttgtacctgaacttctc

SEQ ID NO: 5692 - DNA, 20 bp, Artificial Sequence
  Description of Artificial Sequence: Synthetic oligonucleotide
gcttgtacctgaacttctcc

SEQ ID NO: 5693 - DNA, 20 bp, Artificial Sequence
  Description of Artificial Sequence: Synthetic oligonucleotide
cttgtacctgaacttctcct

SEQ ID NO: 5694 - DNA, 20 bp, Artificial Sequence
  Description of Artificial Sequence: Synthetic oligonucleotide
ttgtacctgaacttctcctt

SEQ ID NO: 5695 - DNA, 20 bp, Artificial Sequence
  Description of Artificial Sequence: Synthetic oligonucleotide
tgtacctgaacttctccttt

SEQ ID NO: 5696 - DNA, 20 bp, Artificial Sequence
  Description of Artificial Sequence: Synthetic oligonucleotide
gtacctgaacttctcctttc

SEQ ID NO: 5697 - DNA, 20 bp, Artificial Sequence
  Description of Artificial Sequence: Synthetic oligonucleotide
tacctgaacttctcctttcc

SEQ ID NO: 5698 - DNA, 20 bp, Artificial Sequence
  Description of Artificial Sequence: Synthetic oligonucleotide
acctgaacttctcctttccg

SEQ ID NO: 5699 - DNA, 20 bp, Artificial Sequence
  Description of Artificial Sequence: Synthetic oligonucleotide
cctgaacttctcctttccgg

SEQ ID NO: 5700 - DNA, 20 bp, Artificial Sequence
  Description of Artificial Sequence: Synthetic oligonucleotide
ctgaacttctcctttccggt

SEQ ID NO: 5701 - DNA, 20 bp, Artificial Sequence
  Description of Artificial Sequence: Synthetic oligonucleotide
tgaacttctcctttccggtc

SEQ ID NO: 5702 - DNA, 20 bp, Artificial Sequence
  Description of Artificial Sequence: Synthetic oligonucleotide
gaacttctcctttccggtcc

SEQ ID NO: 5703 - DNA, 20 bp, Artificial Sequence
  Description of Artificial Sequence: Synthetic oligonucleotide
aacttctcctttccggtccc

SEQ ID NO: 5704 - DNA, 20 bp, Artificial Sequence
  Description of Artificial Sequence: Synthetic oligonucleotide
acttctcctttccggtcccc

SEQ ID NO: 5705 - DNA, 20 bp, Artificial Sequence
  Description of Artificial Sequence: Synthetic oligonucleotide
cttctcctttccggtccccc

SEQ ID NO: 5706 - DNA, 20 bp, Artificial Sequence
  Description of Artificial Sequence: Synthetic oligonucleotide
ttctcctttccggtcccccc

SEQ ID NO: 5707 - DNA, 20 bp, Artificial Sequence
  Description of Artificial Sequence: Synthetic oligonucleotide
tctcctttccggtcccccca

SEQ ID NO: 5708 - DNA, 20 bp, Artificial Sequence
  Description of Artificial Sequence: Synthetic oligonucleotide
ctcctttccggtccccccaa

SEQ ID NO: 5709 - DNA, 20 bp, Artificial Sequence
  Description of Artificial Sequence: Synthetic oligonucleotide
tcctttccggtccccccaaa

SEQ ID NO: 5710 - DNA, 20 bp, Artificial Sequence
  Description of Artificial Sequence: Synthetic oligonucleotide
cctttccggtccccccaaat

SEQ ID NO: 5711 - DNA, 20 bp, Artificial Sequence
  Description of Artificial Sequence: Synthetic oligonucleotide
ctttccggtccccccaaatc

SEQ ID NO: 5712 - DNA, 20 bp, Artificial Sequence
  Description of Artificial Sequence: Synthetic oligonucleotide
tttccggtccccccaaatct

SEQ ID NO: 5713 - DNA, 20 bp, Artificial Sequence
  Description of Artificial Sequence: Synthetic oligonucleotide
ttccggtccccccaaatctc

SEQ ID NO: 5714 - DNA, 20 bp, Artificial Sequence
  Description of Artificial Sequence: Synthetic oligonucleotide
tccggtccccccaaatctca

SEQ ID NO: 5715 - DNA, 20 bp, Artificial Sequence
  Description of Artificial Sequence: Synthetic oligonucleotide
ccggtccccccaaatctcac

SEQ ID NO: 5716 - DNA, 20 bp, Artificial Sequence
  Description of Artificial Sequence: Synthetic oligonucleotide
cggtccccccaaatctcacc

SEQ ID NO: 5717 - DNA, 20 bp, Artificial Sequence
  Description of Artificial Sequence: Synthetic oligonucleotide
ggtccccccaaatctcacct

SEQ ID NO: 5718 - DNA, 20 bp, Artificial Sequence
  Description of Artificial Sequence: Synthetic oligonucleotide
gtccccccaaatctcacctt

SEQ ID NO: 5719 - DNA, 20 bp, Artificial Sequence
  Description of Artificial Sequence: Synthetic oligonucleotide
tccccccaaatctcaccttt

SEQ ID NO: 5720 - DNA, 20 bp, Artificial Sequence
  Description of Artificial Sequence: Synthetic oligonucleotide
ccccccaaatctcacctttg

SEQ ID NO: 5721 - DNA, 20 bp, Artificial Sequence
  Description of Artificial Sequence: Synthetic oligonucleotide
cccccaaatctcacctttgc

SEQ ID NO: 5722 - DNA, 20 bp, Artificial Sequence
  Description of Artificial Sequence: Synthetic oligonucleotide
ccccaaatctcacctttgcg

SEQ ID NO: 5723 - DNA, 20 bp, Artificial Sequence
  Description of Artificial Sequence: Synthetic oligonucleotide
cccaaatctcacctttgcgg

SEQ ID NO: 5724 - DNA, 20 bp, Artificial Sequence
  Description of Artificial Sequence: Synthetic oligonucleotide
ccaaatctcacctttgcgga

SEQ ID NO: 5725 - DNA, 20 bp, Artificial Sequence
  Description of Artificial Sequence: Synthetic oligonucleotide
caaatctcacctttgcggag

SEQ ID NO: 5726 - DNA, 20 bp, Artificial Sequence
  Description of Artificial Sequence: Synthetic oligonucleotide
aaatctcacctttgcggagc

SEQ ID NO: 5727 - DNA, 20 bp, Artificial Sequence
  Description of Artificial Sequence: Synthetic oligonucleotide
aatctcacctttgcggagct

SEQ ID NO: 5728 - DNA, 20 bp, Artificial Sequence
  Description of Artificial Sequence: Synthetic oligonucleotide
atctcacctttgcggagctg

SEQ ID NO: 5729 - DNA, 20 bp, Artificial Sequence
  Description of Artificial Sequence: Synthetic oligonucleotide
tctcacctttgcggagctgt

SEQ ID NO: 5730 - DNA, 20 bp, Artificial Sequence
  Description of Artificial Sequence: Synthetic oligonucleotide
ctcacctttgcggagctgtg

SEQ ID NO: 5731 - DNA, 20 bp, Artificial Sequence
  Description of Artificial Sequence: Synthetic oligonucleotide
tcacctttgcggagctgtgc

SEQ ID NO: 5732 - DNA, 20 bp, Artificial Sequence
  Description of Artificial Sequence: Synthetic oligonucleotide
cacctttgcggagctgtgca

SEQ ID NO: 5733 - DNA, 20 bp, Artificial Sequence
  Description of Artificial Sequence: Synthetic oligonucleotide
acctttgcggagctgtgcac

SEQ ID NO: 5734 - DNA, 20 bp, Artificial Sequence
  Description of Artificial Sequence: Synthetic oligonucleotide
cctttgcggagctgtgcaca

SEQ ID NO: 5735 - DNA, 20 bp, Artificial Sequence
  Description of Artificial Sequence: Synthetic oligonucleotide
ctttgcggagctgtgcacac

SEQ ID NO: 5736 - DNA, 20 bp, Artificial Sequence
  Description of Artificial Sequence: Synthetic oligonucleotide
tttgcggagctgtgcacact

SEQ ID NO: 5737 - DNA, 20 bp, Artificial Sequence
  Description of Artificial Sequence: Synthetic oligonucleotide
ttgcggagctgtgcacactt

SEQ ID NO: 5738 - DNA, 20 bp, Artificial Sequence
  Description of Artificial Sequence: Synthetic oligonucleotide
tgcggagctgtgcacacttg

SEQ ID NO: 5739 - DNA, 20 bp, Artificial Sequence
  Description of Artificial Sequence: Synthetic oligonucleotide
gcggagctgtgcacacttgt

SEQ ID NO: 5740 - DNA, 20 bp, Artificial Sequence
  Description of Artificial Sequence: Synthetic oligonucleotide
cggagctgtgcacacttgtc

SEQ ID NO: 5741 - DNA, 20 bp, Artificial Sequence
  Description of Artificial Sequence: Synthetic oligonucleotide
ggagctgtgcacacttgtcc

SEQ ID NO: 5742 - DNA, 20 bp, Artificial Sequence
  Description of Artificial Sequence: Synthetic oligonucleotide
gagctgtgcacacttgtcca

SEQ ID NO: 5743 - DNA, 20 bp, Artificial Sequence
  Description of Artificial Sequence: Synthetic oligonucleotide
agctgtgcacacttgtccaa

SEQ ID NO: 5744 - DNA, 20 bp, Artificial Sequence
  Description of Artificial Sequence: Synthetic oligonucleotide
gctgtgcacacttgtccaag

SEQ ID NO: 5745 - DNA, 20 bp, Artificial Sequence
  Description of Artificial Sequence: Synthetic oligonucleotide
ctgtgcacacttgtccaagc

SEQ ID NO: 5746 - DNA, 20 bp, Artificial Sequence
  Description of Artificial Sequence: Synthetic oligonucleotide
tgtgcacacttgtccaagca

SEQ ID NO: 5747 - DNA, 20 bp, Artificial Sequence
  Description of Artificial Sequence: Synthetic oligonucleotide
gtgcacacttgtccaagcag

SEQ ID NO: 5748 - DNA, 20 bp, Artificial Sequence
  Description of Artificial Sequence: Synthetic oligonucleotide
tgcacacttgtccaagcagt

SEQ ID NO: 5749 - DNA, 20 bp, Artificial Sequence
  Description of Artificial Sequence: Synthetic oligonucleotide
gcacacttgtccaagcagtt

SEQ ID NO: 5750 - DNA, 20 bp, Artificial Sequence
  Description of Artificial Sequence: Synthetic oligonucleotide
cacacttgtccaagcagttg

SEQ ID NO: 5751 - DNA, 20 bp, Artificial Sequence
  Description of Artificial Sequence: Synthetic oligonucleotide
acacttgtccaagcagttgt

SEQ ID NO: 5752 - DNA, 20 bp, Artificial Sequence
  Description of Artificial Sequence: Synthetic oligonucleotide
cacttgtccaagcagttgtc

SEQ ID NO: 5753 - DNA, 20 bp, Artificial Sequence
  Description of Artificial Sequence: Synthetic oligonucleotide
acttgtccaagcagttgtca

SEQ ID NO: 5754 - DNA, 20 bp, Artificial Sequence
  Description of Artificial Sequence: Synthetic oligonucleotide
cttgtccaagcagttgtcat

SEQ ID NO: 5755 - DNA, 20 bp, Artificial Sequence
  Description of Artificial Sequence: Synthetic oligonucleotide
ttgtccaagcagttgtcatt

SEQ ID NO: 5756 - DNA, 20 bp, Artificial Sequence
  Description of Artificial Sequence: Synthetic oligonucleotide
tgtccaagcagttgtcattg

SEQ ID NO: 5757 - DNA, 20 bp, Artificial Sequence
  Description of Artificial Sequence: Synthetic oligonucleotide
gtccaagcagttgtcattgt

SEQ ID NO: 5758 - DNA, 20 bp, Artificial Sequence
  Description of Artificial Sequence: Synthetic oligonucleotide
tccaagcagttgtcattgtc

SEQ ID NO: 5759 - DNA, 20 bp, Artificial Sequence
  Description of Artificial Sequence: Synthetic oligonucleotide
ccaagcagttgtcattgtcc

SEQ ID NO: 5760 - DNA, 20 bp, Artificial Sequence
  Description of Artificial Sequence: Synthetic oligonucleotide
caagcagttgtcattgtcct

SEQ ID NO: 5761 - DNA, 20 bp, Artificial Sequence
  Description of Artificial Sequence: Synthetic oligonucleotide
aagcagttgtcattgtcctt

SEQ ID NO: 5762 - DNA, 20 bp, Artificial Sequence
  Description of Artificial Sequence: Synthetic oligonucleotide
agcagttgtcattgtccttg

SEQ ID NO: 5763 - DNA, 20 bp, Artificial Sequence
  Description of Artificial Sequence: Synthetic oligonucleotide
gcagttgtcattgtccttgt

SEQ ID NO: 5764 - DNA, 20 bp, Artificial Sequence
  Description of Artificial Sequence: Synthetic oligonucleotide
cagttgtcattgtccttgtc

SEQ ID NO: 5765 - DNA, 20 bp, Artificial Sequence
  Description of Artificial Sequence: Synthetic oligonucleotide
agttgtcattgtccttgtcc

SEQ ID NO: 5766 - DNA, 20 bp, Artificial Sequence
  Description of Artificial Sequence: Synthetic oligonucleotide
gttgtcattgtccttgtcct

SEQ ID NO: 5767 - DNA, 20 bp, Artificial Sequence
  Description of Artificial Sequence: Synthetic oligonucleotide
ttgtcattgtccttgtcctt

SEQ ID NO: 5768 - DNA, 20 bp, Artificial Sequence
  Description of Artificial Sequence: Synthetic oligonucleotide
tgtcattgtccttgtccttg

SEQ ID NO: 5769 - DNA, 20 bp, Artificial Sequence
  Description of Artificial Sequence: Synthetic oligonucleotide
gtcattgtccttgtccttgg

SEQ ID NO: 5770 - DNA, 20 bp, Artificial Sequence
  Description of Artificial Sequence: Synthetic oligonucleotide
tcattgtccttgtccttggt

SEQ ID NO: 5771 - DNA, 20 bp, Artificial Sequence
  Description of Artificial Sequence: Synthetic oligonucleotide
cattgtccttgtccttggtg

SEQ ID NO: 5772 - DNA, 20 bp, Artificial Sequence
  Description of Artificial Sequence: Synthetic oligonucleotide
attgtccttgtccttggtgc

SEQ ID NO: 5773 - DNA, 20 bp, Artificial Sequence
  Description of Artificial Sequence: Synthetic oligonucleotide
ttgtccttgtccttggtgct

SEQ ID NO: 5774 - DNA, 20 bp, Artificial Sequence
  Description of Artificial Sequence: Synthetic oligonucleotide
tgtccttgtccttggtgctg

SEQ ID NO: 5775 - DNA, 20 bp, Artificial Sequence
  Description of Artificial Sequence: Synthetic oligonucleotide
gtccttgtccttggtgctga

SEQ ID NO: 5776 - DNA, 20 bp, Artificial Sequence
  Description of Artificial Sequence: Synthetic oligonucleotide
tccttgtccttggtgctgaa

SEQ ID NO: 5777 - DNA, 20 bp, Artificial Sequence
  Description of Artificial Sequence: Synthetic oligonucleotide
ccttgtccttggtgctgaag

SEQ ID NO: 5778 - DNA, 20 bp, Artificial Sequence
  Description of Artificial Sequence: Synthetic oligonucleotide
cttgtccttggtgctgaagg

SEQ ID NO: 5779 - DNA, 20 bp, Artificial Sequence
  Description of Artificial Sequence: Synthetic oligonucleotide
ttgtccttggtgctgaaggc

SEQ ID NO: 5780 - DNA, 20 bp, Artificial Sequence
  Description of Artificial Sequence: Synthetic oligonucleotide
tgtccttggtgctgaaggct

SEQ ID NO: 5781 - DNA, 20 bp, Artificial Sequence
  Description of Artificial Sequence: Synthetic oligonucleotide
gtccttggtgctgaaggctg

SEQ ID NO: 5782 - DNA, 20 bp, Artificial Sequence
  Description of Artificial Sequence: Synthetic oligonucleotide
tccttggtgctgaaggctgt

SEQ ID NO: 5783 - DNA, 20 bp, Artificial Sequence
  Description of Artificial Sequence: Synthetic oligonucleotide
ccttggtgctgaaggctgtg

SEQ ID NO: 5784 - DNA, 20 bp, Artificial Sequence
  Description of Artificial Sequence: Synthetic oligonucleotide
cttggtgctgaaggctgtgt

SEQ ID NO: 5785 - DNA, 20 bp, Artificial Sequence
  Description of Artificial Sequence: Synthetic oligonucleotide
ttggtgctgaaggctgtgtt

SEQ ID NO: 5786 - DNA, 20 bp, Artificial Sequence
  Description of Artificial Sequence: Synthetic oligonucleotide
tggtgctgaaggctgtgttg

SEQ ID NO: 5787 - DNA, 20 bp, Artificial Sequence
  Description of Artificial Sequence: Synthetic oligonucleotide
ggtgctgaaggctgtgttgt

SEQ ID NO: 5788 - DNA, 20 bp, Artificial Sequence
  Description of Artificial Sequence: Synthetic oligonucleotide
gtgctgaaggctgtgttgtt

SEQ ID NO: 5789 - DNA, 20 bp, Artificial Sequence
  Description of Artificial Sequence: Synthetic oligonucleotide
tgctgaaggctgtgttgtta

SEQ ID NO: 5790 - DNA, 20 bp, Artificial Sequence
  Description of Artificial Sequence: Synthetic oligonucleotide
gctgaaggctgtgttgttat

SEQ ID NO: 5791 - DNA, 20 bp, Artificial Sequence
  Description of Artificial Sequence: Synthetic oligonucleotide
ctgaaggctgtgttgttatg

SEQ ID NO: 5792 - DNA, 20 bp, Artificial Sequence
  Description of Artificial Sequence: Synthetic oligonucleotide
tgaaggctgtgttgttatga

SEQ ID NO: 5793 - DNA, 20 bp, Artificial Sequence
  Description of Artificial Sequence: Synthetic oligonucleotide
gaaggctgtgttgttatgat

SEQ ID NO: 5794 - DNA, 20 bp, Artificial Sequence
  Description of Artificial Sequence: Synthetic oligonucleotide
aaggctgtgttgttatgata

SEQ ID NO: 5795 - DNA, 20 bp, Artificial Sequence
  Description of Artificial Sequence: Synthetic oligonucleotide
aggctgtgttgttatgatac

SEQ ID NO: 5796 - DNA, 20 bp, Artificial Sequence
  Description of Artificial Sequence: Synthetic oligonucleotide
ggctgtgttgttatgatact

SEQ ID NO: 5797 - DNA, 20 bp, Artificial Sequence
  Description of Artificial Sequence: Synthetic oligonucleotide
gctgtgttgttatgatactg

SEQ ID NO: 5798 - DNA, 20 bp, Artificial Sequence
  Description of Artificial Sequence: Synthetic oligonucleotide
ctgtgttgttatgatactgg

SEQ ID NO: 5799 - DNA, 20 bp, Artificial Sequence
  Description of Artificial Sequence: Synthetic oligonucleotide
tgtgttgttatgatactgga

SEQ ID NO: 5800 - DNA, 20 bp, Artificial Sequence
  Description of Artificial Sequence: Synthetic oligonucleotide
gtgttgttatgatactggag

SEQ ID NO: 5801 - DNA, 20 bp, Artificial Sequence
  Description of Artificial Sequence: Synthetic oligonucleotide
tgttgttatgatactggagg

SEQ ID NO: 5802 - DNA, 20 bp, Artificial Sequence
  Description of Artificial Sequence: Synthetic oligonucleotide
gttgttatgatactggaggg

SEQ ID NO: 5803 - DNA, 20 bp, Artificial Sequence
  Description of Artificial Sequence: Synthetic oligonucleotide
ttgttatgatactggagggc

SEQ ID NO: 5804 - DNA, 20 bp, Artificial Sequence
  Description of Artificial Sequence: Synthetic oligonucleotide
tgttatgatactggagggcg

SEQ ID NO: 5805 - DNA, 20 bp, Artificial Sequence
  Description of Artificial Sequence: Synthetic oligonucleotide
gttatgatactggagggcgt

SEQ ID NO: 5806 - DNA, 20 bp, Artificial Sequence
  Description of Artificial Sequence: Synthetic oligonucleotide
ttatgatactggagggcgtc

SEQ ID NO: 5807 - DNA, 20 bp, Artificial Sequence
  Description of Artificial Sequence: Synthetic oligonucleotide
tatgatactggagggcgtcg

SEQ ID NO: 5808 - DNA, 20 bp, Artificial Sequence
  Description of Artificial Sequence: Synthetic oligonucleotide
atgatactggagggcgtcgt

SEQ ID NO: 5809 - DNA, 20 bp, Artificial Sequence
  Description of Artificial Sequence: Synthetic oligonucleotide
tgatactggagggcgtcgtt

SEQ ID NO: 5810 - DNA, 20 bp, Artificial Sequence
  Description of Artificial Sequence: Synthetic oligonucleotide
gatactggagggcgtcgttc

SEQ ID NO: 5811 - DNA, 20 bp, Artificial Sequence
  Description of Artificial Sequence: Synthetic oligonucleotide
atactggagggcgtcgttcc

SEQ ID NO: 5812 - DNA, 20 bp, Artificial Sequence
  Description of Artificial Sequence: Synthetic oligonucleotide
tactggagggcgtcgttccc

SEQ ID NO: 5813 - DNA, 20 bp, Artificial Sequence
  Description of Artificial Sequence: Synthetic oligonucleotide
actggagggcgtcgttcccc

SEQ ID NO: 5814 - DNA, 20 bp, Artificial Sequence
  Description of Artificial Sequence: Synthetic oligonucleotide
ctggagggcgtcgttcccca

SEQ ID NO: 5815 - DNA, 20 bp, Artificial Sequence
  Description of Artificial Sequence: Synthetic oligonucleotide
tggagggcgtcgttccccac

SEQ ID NO: 5816 - DNA, 20 bp, Artificial Sequence
  Description of Artificial Sequence: Synthetic oligonucleotide
ggagggcgtcgttccccaca

SEQ ID NO: 5817 - DNA, 20 bp, Artificial Sequence
  Description of Artificial Sequence: Synthetic oligonucleotide
gagggcgtcgttccccacat

SEQ ID NO: 5818 - DNA, 20 bp, Artificial Sequence
  Description of Artificial Sequence: Synthetic oligonucleotide
agggcgtcgttccccacatt

SEQ ID NO: 5819 - DNA, 20 bp, Artificial Sequence
  Description of Artificial Sequence: Synthetic oligonucleotide
gggcgtcgttccccacattg

SEQ ID NO: 5820 - DNA, 20 bp, Artificial Sequence
  Description of Artificial Sequence: Synthetic oligonucleotide
ggcgtcgttccccacattgc

SEQ ID NO: 5821 - DNA, 20 bp, Artificial Sequence
  Description of Artificial Sequence: Synthetic oligonucleotide
gcgtcgttccccacattgcc

SEQ ID NO: 5822 - DNA, 20 bp, Artificial Sequence
  Description of Artificial Sequence: Synthetic oligonucleotide
cgtcgttccccacattgcca

SEQ ID NO: 5823 - DNA, 20 bp, Artificial Sequence
  Description of Artificial Sequence: Synthetic oligonucleotide
gtcgttccccacattgccag

SEQ ID NO: 5824 - DNA, 20 bp, Artificial Sequence
  Description of Artificial Sequence: Synthetic oligonucleotide
tcgttccccacattgccagt

SEQ ID NO: 5825 - DNA, 20 bp, Artificial Sequence
  Description of Artificial Sequence: Synthetic oligonucleotide
cgttccccacattgccagtg

SEQ ID NO: 5826 - DNA, 20 bp, Artificial Sequence
  Description of Artificial Sequence: Synthetic oligonucleotide
gttccccacattgccagtgt

SEQ ID NO: 5827 - DNA, 20 bp, Artificial Sequence
  Description of Artificial Sequence: Synthetic oligonucleotide
ttccccacattgccagtgta

SEQ ID NO: 5828 - DNA, 20 bp, Artificial Sequence
  Description of Artificial Sequence: Synthetic oligonucleotide
tccccacattgccagtgtag

SEQ ID NO: 5829 - DNA, 20 bp, Artificial Sequence
  Description of Artificial Sequence: Synthetic oligonucleotide
ccccacattgccagtgtagt

SEQ ID NO: 5830 - DNA, 20 bp, Artificial Sequence
  Description of Artificial Sequence: Synthetic oligonucleotide
cccacattgccagtgtagtt

SEQ ID NO: 5831 - DNA, 20 bp, Artificial Sequence
  Description of Artificial Sequence: Synthetic oligonucleotide
ccacattgccagtgtagttc

SEQ ID NO: 5832 - DNA, 20 bp, Artificial Sequence
  Description of Artificial Sequence: Synthetic oligonucleotide
cacattgccagtgtagttcc

SEQ ID NO: 5833 - DNA, 20 bp, Artificial Sequence
  Description of Artificial Sequence: Synthetic oligonucleotide
acattgccagtgtagttccc

SEQ ID NO: 5834 - DNA, 20 bp, Artificial Sequence
  Description of Artificial Sequence: Synthetic oligonucleotide
cattgccagtgtagttcccc

SEQ ID NO: 5835 - DNA, 20 bp, Artificial Sequence
  Description of Artificial Sequence: Synthetic oligonucleotide
attgccagtgtagttcccca

SEQ ID NO: 5836 - DNA, 20 bp, Artificial Sequence
  Description of Artificial Sequence: Synthetic oligonucleotide
ttgccagtgtagttccccag

SEQ ID NO: 5837 - DNA, 20 bp, Artificial Sequence
  Description of Artificial Sequence: Synthetic oligonucleotide
tgccagtgtagttccccagg

SEQ ID NO: 5838 - DNA, 20 bp, Artificial Sequence
  Description of Artificial Sequence: Synthetic oligonucleotide
gccagtgtagttccccagga

SEQ ID NO: 5839 - DNA, 20 bp, Artificial Sequence
  Description of Artificial Sequence: Synthetic oligonucleotide
ccagtgtagttccccaggaa

SEQ ID NO: 5840 - DNA, 20 bp, Artificial Sequence
  Description of Artificial Sequence: Synthetic oligonucleotide
cagtgtagttccccaggaag

SEQ ID NO: 5841 - DNA, 20 bp, Artificial Sequence
  Description of Artificial Sequence: Synthetic oligonucleotide
agtgtagttccccaggaaga

SEQ ID NO: 5842 - DNA, 20 bp, Artificial Sequence
  Description of Artificial Sequence: Synthetic oligonucleotide
gtgtagttccccaggaagag

SEQ ID NO: 5843 - DNA, 20 bp, Artificial Sequence
  Description of Artificial Sequence: Synthetic oligonucleotide
tgtagttccccaggaagagg

SEQ ID NO: 5844 - DNA, 20 bp, Artificial Sequence
  Description of Artificial Sequence: Synthetic oligonucleotide
gtagttccccaggaagaggc

SEQ ID NO: 5845 - DNA, 20 bp, Artificial Sequence
  Description of Artificial Sequence: Synthetic oligonucleotide
tagttccccaggaagaggcg

SEQ ID NO: 5846 - DNA, 20 bp, Artificial Sequence
  Description of Artificial Sequence: Synthetic oligonucleotide
agttccccaggaagaggcga

SEQ ID NO: 5847 - DNA, 20 bp, Artificial Sequence
  Description of Artificial Sequence: Synthetic oligonucleotide
gttccccaggaagaggcgat

SEQ ID NO: 5848 - DNA, 20 bp, Artificial Sequence
  Description of Artificial Sequence: Synthetic oligonucleotide
ttccccaggaagaggcgata

SEQ ID NO: 5849 - DNA, 20 bp, Artificial Sequence
  Description of Artificial Sequence: Synthetic oligonucleotide
tccccaggaagaggcgatag

SEQ ID NO: 5850 - DNA, 20 bp, Artificial Sequence
  Description of Artificial Sequence: Synthetic oligonucleotide
ccccaggaagaggcgatagc

SEQ ID NO: 5851 - DNA, 20 bp, Artificial Sequence
  Description of Artificial Sequence: Synthetic oligonucleotide
cccaggaagaggcgatagct

SEQ ID NO: 5852 - DNA, 20 bp, Artificial Sequence
  Description of Artificial Sequence: Synthetic oligonucleotide
ccaggaagaggcgatagctg

SEQ ID NO: 5853 - DNA, 20 bp, Artificial Sequence
  Description of Artificial Sequence: Synthetic oligonucleotide
caggaagaggcgatagctgt

SEQ ID NO: 5854 - DNA, 20 bp, Artificial Sequence
  Description of Artificial Sequence: Synthetic oligonucleotide
aggaagaggcgatagctgtt

SEQ ID NO: 5855 - DNA, 20 bp, Artificial Sequence
  Description of Artificial Sequence: Synthetic oligonucleotide
ggaagaggcgatagctgttg

SEQ ID NO: 5856 - DNA, 20 bp, Artificial Sequence
  Description of Artificial Sequence: Synthetic oligonucleotide
gaagaggcgatagctgttga

SEQ ID NO: 5857 - DNA, 20 bp, Artificial Sequence
  Description of Artificial Sequence: Synthetic oligonucleotide
aagaggcgatagctgttgag

SEQ ID NO: 5858 - DNA, 20 bp, Artificial Sequence
  Description of Artificial Sequence: Synthetic oligonucleotide
agaggcgatagctgttgagt

SEQ ID NO: 5859 - DNA, 20 bp, Artificial Sequence
  Description of Artificial Sequence: Synthetic oligonucleotide
gaggcgatagctgttgagtt

SEQ ID NO: 5860 - DNA, 20 bp, Artificial Sequence
  Description of Artificial Sequence: Synthetic oligonucleotide
aggcgatagctgttgagttc

SEQ ID NO: 5861 - DNA, 20 bp, Artificial Sequence
  Description of Artificial Sequence: Synthetic oligonucleotide
ggcgatagctgttgagttca

SEQ ID NO: 5862 - DNA, 20 bp, Artificial Sequence
  Description of Artificial Sequence: Synthetic oligonucleotide
gcgatagctgttgagttcat

SEQ ID NO: 5863 - DNA, 20 bp, Artificial Sequence
  Description of Artificial Sequence: Synthetic oligonucleotide
cgatagctgttgagttcatt

SEQ ID NO: 5864 - DNA, 20 bp, Artificial Sequence
  Description of Artificial Sequence: Synthetic oligonucleotide
gatagctgttgagttcattg

SEQ ID NO: 5865 - DNA, 20 bp, Artificial Sequence
  Description of Artificial Sequence: Synthetic oligonucleotide
atagctgttgagttcattgc

SEQ ID NO: 5866 - DNA, 20 bp, Artificial Sequence
  Description of Artificial Sequence: Synthetic oligonucleotide
tagctgttgagttcattgcc

SEQ ID NO: 5867 - DNA, 20 bp, Artificial Sequence
  Description of Artificial Sequence: Synthetic oligonucleotide
agctgttgagttcattgccc

SEQ ID NO: 5868 - DNA, 20 bp, Artificial Sequence
  Description of Artificial Sequence: Synthetic oligonucleotide
gctgttgagttcattgccca

SEQ ID NO: 5869 - DNA, 20 bp, Artificial Sequence
  Description of Artificial Sequence: Synthetic oligonucleotide
ctgttgagttcattgcccaa

SEQ ID NO: 5870 - DNA, 20 bp, Artificial Sequence
  Description of Artificial Sequence: Synthetic oligonucleotide
tgttgagttcattgcccaaa

SEQ ID NO: 5871 - DNA, 20 bp, Artificial Sequence
  Description of Artificial Sequence: Synthetic oligonucleotide
gttgagttcattgcccaaaa

SEQ ID NO: 5872 - DNA, 20 bp, Artificial Sequence
  Description of Artificial Sequence: Synthetic oligonucleotide
ttgagttcattgcccaaaac

SEQ ID NO: 5873 - DNA, 20 bp, Artificial Sequence
  Description of Artificial Sequence: Synthetic oligonucleotide
tgagttcattgcccaaaaca

SEQ ID NO: 5874 - DNA, 20 bp, Artificial Sequence
  Description of Artificial Sequence: Synthetic oligonucleotide
gagttcattgcccaaaacaa

SEQ ID NO: 5875 - DNA, 20 bp, Artificial Sequence
  Description of Artificial Sequence: Synthetic oligonucleotide
agttcattgcccaaaacaaa

SEQ ID NO: 5876 - DNA, 20 bp, Artificial Sequence
  Description of Artificial Sequence: Synthetic oligonucleotide
gttcattgcccaaaacaaag

SEQ ID NO: 5877 - DNA, 20 bp, Artificial Sequence
  Description of Artificial Sequence: Synthetic oligonucleotide
ttcattgcccaaaacaaagt

SEQ ID NO: 5878 - DNA, 20 bp, Artificial Sequence
  Description of Artificial Sequence: Synthetic oligonucleotide
tcattgcccaaaacaaagtg

SEQ ID NO: 5879 - DNA, 20 bp, Artificial Sequence
  Description of Artificial Sequence: Synthetic oligonucleotide
cattgcccaaaacaaagtgg

SEQ ID NO: 5880 - DNA, 20 bp, Artificial Sequence
  Description of Artificial Sequence: Synthetic oligonucleotide
attgcccaaaacaaagtggc

SEQ ID NO: 5881 - DNA, 20 bp, Artificial Sequence
  Description of Artificial Sequence: Synthetic oligonucleotide
ttgcccaaaacaaagtggct

SEQ ID NO: 5882 - DNA, 20 bp, Artificial Sequence
  Description of Artificial Sequence: Synthetic oligonucleotide
tgcccaaaacaaagtggcta

SEQ ID NO: 5883 - DNA, 20 bp, Artificial Sequence
  Description of Artificial Sequence: Synthetic oligonucleotide
gcccaaaacaaagtggctat

SEQ ID NO: 5884 - DNA, 20 bp, Artificial Sequence
  Description of Artificial Sequence: Synthetic oligonucleotide
cccaaaacaaagtggctata

SEQ ID NO: 5885 - DNA, 20 bp, Artificial Sequence
  Description of Artificial Sequence: Synthetic oligonucleotide
ccaaaacaaagtggctatac

SEQ ID NO: 5886 - DNA, 20 bp, Artificial Sequence
  Description of Artificial Sequence: Synthetic oligonucleotide
caaaacaaagtggctatact

SEQ ID NO: 5887 - DNA, 20 bp, Artificial Sequence
  Description of Artificial Sequence: Synthetic oligonucleotide
aaaacaaagtggctatactc

SEQ ID NO: 5888 - DNA, 20 bp, Artificial Sequence
  Description of Artificial Sequence: Synthetic oligonucleotide
aaacaaagtggctatactca

SEQ ID NO: 5889 - DNA, 20 bp, Artificial Sequence
  Description of Artificial Sequence: Synthetic oligonucleotide
aacaaagtggctatactcag

SEQ ID NO: 5890 - DNA, 20 bp, Artificial Sequence
  Description of Artificial Sequence: Synthetic oligonucleotide
acaaagtggctatactcagc

SEQ ID NO: 5891 - DNA, 20 bp, Artificial Sequence
  Description of Artificial Sequence: Synthetic oligonucleotide
caaagtggctatactcagcg

SEQ ID NO: 5892 - DNA, 20 bp, Artificial Sequence
  Description of Artificial Sequence: Synthetic oligonucleotide
aaagtggctatactcagcgt

SEQ ID NO: 5893 - DNA, 20 bp, Artificial Sequence
  Description of Artificial Sequence: Synthetic oligonucleotide
aagtggctatactcagcgta

SEQ ID NO: 5894 - DNA, 20 bp, Artificial Sequence
  Description of Artificial Sequence: Synthetic oligonucleotide
agtggctatactcagcgtag

SEQ ID NO: 5895 - DNA, 20 bp, Artificial Sequence
  Description of Artificial Sequence: Synthetic oligonucleotide
gtggctatactcagcgtagc

SEQ ID NO: 5896 - DNA, 20 bp, Artificial Sequence
  Description of Artificial Sequence: Synthetic oligonucleotide
tggctatactcagcgtagcg

SEQ ID NO: 5897 - DNA, 20 bp, Artificial Sequence
  Description of Artificial Sequence: Synthetic oligonucleotide
ggctatactcagcgtagcgc

SEQ ID NO: 5898 - DNA, 20 bp, Artificial Sequence
  Description of Artificial Sequence: Synthetic oligonucleotide
gctatactcagcgtagcgca

SEQ ID NO: 5899 - DNA, 20 bp, Artificial Sequence
  Description of Artificial Sequence: Synthetic oligonucleotide
ctatactcagcgtagcgcag

SEQ ID NO: 5900 - DNA, 20 bp, Artificial Sequence
  Description of Artificial Sequence: Synthetic oligonucleotide
tatactcagcgtagcgcagg

SEQ ID NO: 5901 - DNA, 20 bp, Artificial Sequence
  Description of Artificial Sequence: Synthetic oligonucleotide
atactcagcgtagcgcaggt

SEQ ID NO: 5902 - DNA, 20 bp, Artificial Sequence
  Description of Artificial Sequence: Synthetic oligonucleotide
tactcagcgtagcgcaggtt

SEQ ID NO: 5903 - DNA, 20 bp, Artificial Sequence
  Description of Artificial Sequence: Synthetic oligonucleotide
actcagcgtagcgcaggttg

SEQ ID NO: 5904 - DNA, 20 bp, Artificial Sequence
  Description of Artificial Sequence: Synthetic oligonucleotide
ctcagcgtagcgcaggttgc

SEQ ID NO: 5905 - DNA, 20 bp, Artificial Sequence
  Description of Artificial Sequence: Synthetic oligonucleotide
tcagcgtagcgcaggttgcc

SEQ ID NO: 5906 - DNA, 20 bp, Artificial Sequence
  Description of Artificial Sequence: Synthetic oligonucleotide
cagcgtagcgcaggttgccc

SEQ ID NO: 5907 - DNA, 20 bp, Artificial Sequence
  Description of Artificial Sequence: Synthetic oligonucleotide
agcgtagcgcaggttgccct

SEQ ID NO: 5908 - DNA, 20 bp, Artificial Sequence
  Description of Artificial Sequence: Synthetic oligonucleotide
gcgtagcgcaggttgccctc

SEQ ID NO: 5909 - DNA, 20 bp, Artificial Sequence
  Description of Artificial Sequence: Synthetic oligonucleotide
cgtagcgcaggttgccctcc

SEQ ID NO: 5910 - DNA, 20 bp, Artificial Sequence
  Description of Artificial Sequence: Synthetic oligonucleotide
gtagcgcaggttgccctccc

SEQ ID NO: 5911 - DNA, 20 bp, Artificial Sequence
  Description of Artificial Sequence: Synthetic oligonucleotide
tagcgcaggttgccctccca

SEQ ID NO: 5912 - DNA, 20 bp, Artificial Sequence
  Description of Artificial Sequence: Synthetic oligonucleotide
agcgcaggttgccctcccag

SEQ ID NO: 5913 - DNA, 20 bp, Artificial Sequence
  Description of Artificial Sequence: Synthetic oligonucleotide
gcgcaggttgccctcccagt

SEQ ID NO: 5914 - DNA, 20 bp, Artificial Sequence
  Description of Artificial Sequence: Synthetic oligonucleotide
cgcaggttgccctcccagtc

SEQ ID NO: 5915 - DNA, 20 bp, Artificial Sequence
  Description of Artificial Sequence: Synthetic oligonucleotide
gcaggttgccctcccagtcc

SEQ ID NO: 5916 - DNA, 20 bp, Artificial Sequence
  Description of Artificial Sequence: Synthetic oligonucleotide
caggttgccctcccagtcct

SEQ ID NO: 5917 - DNA, 20 bp, Artificial Sequence
  Description of Artificial Sequence: Synthetic oligonucleotide
aggttgccctcccagtcctg

SEQ ID NO: 5918 - DNA, 20 bp, Artificial Sequence
  Description of Artificial Sequence: Synthetic oligonucleotide
ggttgccctcccagtcctgt

SEQ ID NO: 5919 - DNA, 20 bp, Artificial Sequence
  Description of Artificial Sequence: Synthetic oligonucleotide
gttgccctcccagtcctgtc

SEQ ID NO: 5920 - DNA, 20 bp, Artificial Sequence
  Description of Artificial Sequence: Synthetic oligonucleotide
ttgccctcccagtcctgtca

SEQ ID NO: 5921 - DNA, 20 bp, Artificial Sequence
  Description of Artificial Sequence: Synthetic oligonucleotide
tgccctcccagtcctgtcag

SEQ ID NO: 5922 - DNA, 20 bp, Artificial Sequence
  Description of Artificial Sequence: Synthetic oligonucleotide
gccctcccagtcctgtcagg

SEQ ID NO: 5923 - DNA, 20 bp, Artificial Sequence
  Description of Artificial Sequence: Synthetic oligonucleotide
ccctcccagtcctgtcagga

SEQ ID NO: 5924 - DNA, 20 bp, Artificial Sequence
  Description of Artificial Sequence: Synthetic oligonucleotide
cctcccagtcctgtcaggag

SEQ ID NO: 5925 - DNA, 20 bp, Artificial Sequence
  Description of Artificial Sequence: Synthetic oligonucleotide
ctcccagtcctgtcaggagg

SEQ ID NO: 5926 - DNA, 20 bp, Artificial Sequence
  Description of Artificial Sequence: Synthetic oligonucleotide
tcccagtcctgtcaggagga

SEQ ID NO: 5927 - DNA, 20 bp, Artificial Sequence
  Description of Artificial Sequence: Synthetic oligonucleotide
cccagtcctgtcaggaggag

SEQ ID NO: 5928 - DNA, 20 bp, Artificial Sequence
  Description of Artificial Sequence: Synthetic oligonucleotide
ccagtcctgtcaggaggagc

SEQ ID NO: 5929 - DNA, 20 bp, Artificial Sequence
  Description of Artificial Sequence: Synthetic oligonucleotide
cagtcctgtcaggaggagca

SEQ ID NO: 5930 - DNA, 20 bp, Artificial Sequence
  Description of Artificial Sequence: Synthetic oligonucleotide
agtcctgtcaggaggagcag

SEQ ID NO: 5931 - DNA, 20 bp, Artificial Sequence
  Description of Artificial Sequence: Synthetic oligonucleotide
gtcctgtcaggaggagcaga

SEQ ID NO: 5932 - DNA, 20 bp, Artificial Sequence
  Description of Artificial Sequence: Synthetic oligonucleotide
tcctgtcaggaggagcagag

SEQ ID NO: 5933 - DNA, 20 bp, Artificial Sequence
  Description of Artificial Sequence: Synthetic oligonucleotide
cctgtcaggaggagcagagc

SEQ ID NO: 5934 - DNA, 20 bp, Artificial Sequence
  Description of Artificial Sequence: Synthetic oligonucleotide
ctgtcaggaggagcagagcc

SEQ ID NO: 5935 - DNA, 20 bp, Artificial Sequence
  Description of Artificial Sequence: Synthetic oligonucleotide
tgtcaggaggagcagagcct

SEQ ID NO: 5936 - DNA, 20 bp, Artificial Sequence
  Description of Artificial Sequence: Synthetic oligonucleotide
gtcaggaggagcagagcctt

SEQ ID NO: 5937 - DNA, 20 bp, Artificial Sequence
  Description of Artificial Sequence: Synthetic oligonucleotide
tcaggaggagcagagcctta

SEQ ID NO: 5938 - DNA, 20 bp, Artificial Sequence
  Description of Artificial Sequence: Synthetic oligonucleotide
caggaggagcagagccttaa

SEQ ID NO: 5939 - DNA, 20 bp, Artificial Sequence
  Description of Artificial Sequence: Synthetic oligonucleotide
aggaggagcagagccttaaa

SEQ ID NO: 5940 - DNA, 20 bp, Artificial Sequence
  Description of Artificial Sequence: Synthetic oligonucleotide
ggaggagcagagccttaaag

SEQ ID NO: 5941 - DNA, 20 bp, Artificial Sequence
  Description of Artificial Sequence: Synthetic oligonucleotide
gaggagcagagccttaaaga

SEQ ID NO: 5942 - DNA, 20 bp, Artificial Sequence
  Description of Artificial Sequence: Synthetic oligonucleotide
aggagcagagccttaaagaa

SEQ ID NO: 5943 - DNA, 20 bp, Artificial Sequence
  Description of Artificial Sequence: Synthetic oligonucleotide
ggagcagagccttaaagaaa

SEQ ID NO: 5944 - DNA, 20 bp, Artificial Sequence
  Description of Artificial Sequence: Synthetic oligonucleotide
gagcagagccttaaagaaag

SEQ ID NO: 5945 - DNA, 20 bp, Artificial Sequence
  Description of Artificial Sequence: Synthetic oligonucleotide
agcagagccttaaagaaagt

SEQ ID NO: 5946 - DNA, 20 bp, Artificial Sequence
  Description of Artificial Sequence: Synthetic oligonucleotide
gcagagccttaaagaaagtg

SEQ ID NO: 5947 - DNA, 20 bp, Artificial Sequence
  Description of Artificial Sequence: Synthetic oligonucleotide
cagagccttaaagaaagtgc

SEQ ID NO: 5948 - DNA, 20 bp, Artificial Sequence
  Description of Artificial Sequence: Synthetic oligonucleotide
agagccttaaagaaagtgca

SEQ ID NO: 5949 - DNA, 20 bp, Artificial Sequence
  Description of Artificial Sequence: Synthetic oligonucleotide
gagccttaaagaaagtgcag

SEQ ID NO: 5950 - DNA, 20 bp, Artificial Sequence
  Description of Artificial Sequence: Synthetic oligonucleotide
agccttaaagaaagtgcagc

SEQ ID NO: 5951 - DNA, 20 bp, Artificial Sequence
  Description of Artificial Sequence: Synthetic oligonucleotide
gccttaaagaaagtgcagca

SEQ ID NO: 5952 - DNA, 20 bp, Artificial Sequence
  Description of Artificial Sequence: Synthetic oligonucleotide
ccttaaagaaagtgcagcag

SEQ ID NO: 5953 - DNA, 20 bp, Artificial Sequence
  Description of Artificial Sequence: Synthetic oligonucleotide
cttaaagaaagtgcagcagg

SEQ ID NO: 5954 - DNA, 20 bp, Artificial Sequence
  Description of Artificial Sequence: Synthetic oligonucleotide
ttaaagaaagtgcagcaggc

SEQ ID NO: 5955 - DNA, 20 bp, Artificial Sequence
  Description of Artificial Sequence: Synthetic oligonucleotide
taaagaaagtgcagcaggct

SEQ ID NO: 5956 - DNA, 20 bp, Artificial Sequence
  Description of Artificial Sequence: Synthetic oligonucleotide
aaagaaagtgcagcaggctc

SEQ ID NO: 5957 - DNA, 20 bp, Artificial Sequence
  Description of Artificial Sequence: Synthetic oligonucleotide
aagaaagtgcagcaggctcc

SEQ ID NO: 5958 - DNA, 20 bp, Artificial Sequence
  Description of Artificial Sequence: Synthetic oligonucleotide
agaaagtgcagcaggctcca

SEQ ID NO: 5959 - DNA, 20 bp, Artificial Sequence
  Description of Artificial Sequence: Synthetic oligonucleotide
gaaagtgcagcaggctccat

SEQ ID NO: 5960 - DNA, 20 bp, Artificial Sequence
  Description of Artificial Sequence: Synthetic oligonucleotide
aaagtgcagcaggctccatt

SEQ ID NO: 5961 - DNA, 20 bp, Artificial Sequence
  Description of Artificial Sequence: Synthetic oligonucleotide
aagtgcagcaggctccattt

SEQ ID NO: 5962 - DNA, 20 bp, Artificial Sequence
  Description of Artificial Sequence: Synthetic oligonucleotide
agtgcagcaggctccatttc

SEQ ID NO: 5963 - DNA, 20 bp, Artificial Sequence
  Description of Artificial Sequence: Synthetic oligonucleotide
gtgcagcaggctccatttca

SEQ ID NO: 5964 - DNA, 20 bp, Artificial Sequence
  Description of Artificial Sequence: Synthetic oligonucleotide
tgcagcaggctccatttcat

SEQ ID NO: 5965 - DNA, 20 bp, Artificial Sequence
  Description of Artificial Sequence: Synthetic oligonucleotide
gcagcaggctccatttcatg

SEQ ID NO: 5966 - DNA, 20 bp, Artificial Sequence
  Description of Artificial Sequence: Synthetic oligonucleotide
cagcaggctccatttcatgc

SEQ ID NO: 5967 - DNA, 20 bp, Artificial Sequence
  Description of Artificial Sequence: Synthetic oligonucleotide
agcaggctccatttcatgct

SEQ ID NO: 5968 - DNA, 20 bp, Artificial Sequence
  Description of Artificial Sequence: Synthetic oligonucleotide
gcaggctccatttcatgctg

SEQ ID NO: 5969 - DNA, 20 bp, Artificial Sequence
  Description of Artificial Sequence: Synthetic oligonucleotide
caggctccatttcatgctgt

SEQ ID NO: 5970 - DNA, 20 bp, Artificial Sequence
  Description of Artificial Sequence: Synthetic oligonucleotide
aggctccatttcatgctgtc

SEQ ID NO: 5971 - DNA, 20 bp, Artificial Sequence
  Description of Artificial Sequence: Synthetic oligonucleotide
ggctccatttcatgctgtct

SEQ ID NO: 5972 - DNA, 20 bp, Artificial Sequence
  Description of Artificial Sequence: Synthetic oligonucleotide
gctccatttcatgctgtctc

SEQ ID NO: 5973 - DNA, 20 bp, Artificial Sequence
  Description of Artificial Sequence: Synthetic oligonucleotide
ctccatttcatgctgtctct

SEQ ID NO: 5974 - DNA, 20 bp, Artificial Sequence
  Description of Artificial Sequence: Synthetic oligonucleotide
tccatttcatgctgtctcta

SEQ ID NO: 5975 - DNA, 20 bp, Artificial Sequence
  Description of Artificial Sequence: Synthetic oligonucleotide
ccatttcatgctgtctctat

SEQ ID NO: 5976 - DNA, 20 bp, Artificial Sequence
  Description of Artificial Sequence: Synthetic oligonucleotide
catttcatgctgtctctata

SEQ ID NO: 5977 - DNA, 20 bp, Artificial Sequence
  Description of Artificial Sequence: Synthetic oligonucleotide
atttcatgctgtctctatac

SEQ ID NO: 5978 - DNA, 20 bp, Artificial Sequence
  Description of Artificial Sequence: Synthetic oligonucleotide
tttcatgctgtctctatacc

SEQ ID NO: 5979 - DNA, 20 bp, Artificial Sequence
  Description of Artificial Sequence: Synthetic oligonucleotide
ttcatgctgtctctataccc

SEQ ID NO: 5980 - DNA, 20 bp, Artificial Sequence
  Description of Artificial Sequence: Synthetic oligonucleotide
tcatgctgtctctatacccc

SEQ ID NO: 5981 - DNA, 20 bp, Artificial Sequence
  Description of Artificial Sequence: Synthetic oligonucleotide
catgctgtctctatacccct

SEQ ID NO: 5982 - DNA, 20 bp, Artificial Sequence
  Description of Artificial Sequence: Synthetic oligonucleotide
atgctgtctctatacccctt

SEQ ID NO: 5983 - DNA, 20 bp, Artificial Sequence
  Description of Artificial Sequence: Synthetic oligonucleotide
tgctgtctctataccccttc

SEQ ID NO: 5984 - DNA, 20 bp, Artificial Sequence
  Description of Artificial Sequence: Synthetic oligonucleotide
gctgtctctataccccttct

SEQ ID NO: 5985 - DNA, 20 bp, Artificial Sequence
  Description of Artificial Sequence: Synthetic oligonucleotide
ctgtctctataccccttctc

SEQ ID NO: 5986 - DNA, 20 bp, Artificial Sequence
  Description of Artificial Sequence: Synthetic oligonucleotide
tgtctctataccccttctct

SEQ ID NO: 5987 - DNA, 20 bp, Artificial Sequence
  Description of Artificial Sequence: Synthetic oligonucleotide
gtctctataccccttctctc

SEQ ID NO: 5988 - DNA, 20 bp, Artificial Sequence
  Description of Artificial Sequence: Synthetic oligonucleotide
tctctataccccttctctcc

SEQ ID NO: 5989 - DNA, 20 bp, Artificial Sequence
  Description of Artificial Sequence: Synthetic oligonucleotide
ctctataccccttctctcct

SEQ ID NO: 5990 - DNA, 20 bp, Artificial Sequence
  Description of Artificial Sequence: Synthetic oligonucleotide
tctataccccttctctcctg

SEQ ID NO: 5991 - DNA, 20 bp, Artificial Sequence
  Description of Artificial Sequence: Synthetic oligonucleotide
ctataccccttctctcctga

SEQ ID NO: 5992 - DNA, 20 bp, Artificial Sequence
  Description of Artificial Sequence: Synthetic oligonucleotide
tataccccttctctcctgac

SEQ ID NO: 5993 - DNA, 20 bp, Artificial Sequence
  Description of Artificial Sequence: Synthetic oligonucleotide
ataccccttctctcctgaca

SEQ ID NO: 5994 - DNA, 20 bp, Artificial Sequence
  Description of Artificial Sequence: Synthetic oligonucleotide
taccccttctctcctgacag

SEQ ID NO: 5995 - DNA, 20 bp, Artificial Sequence
  Description of Artificial Sequence: Synthetic oligonucleotide
accccttctctcctgacagt

SEQ ID NO: 5996 - DNA, 20 bp, Artificial Sequence
  Description of Artificial Sequence: Synthetic oligonucleotide
ccccttctctcctgacagtc

SEQ ID NO: 5997 - DNA, 20 bp, Artificial Sequence
  Description of Artificial Sequence: Synthetic oligonucleotide
cccttctctcctgacagtcc

SEQ ID NO: 5998 - DNA, 20 bp, Artificial Sequence
  Description of Artificial Sequence: Synthetic oligonucleotide
ccttctctcctgacagtccc

SEQ ID NO: 5999 - DNA, 20 bp, Artificial Sequence
  Description of Artificial Sequence: Synthetic oligonucleotide
cttctctcctgacagtccca

SEQ ID NO: 6000 - DNA, 20 bp, Artificial Sequence
  Description of Artificial Sequence: Synthetic oligonucleotide
ttctctcctgacagtcccat

SEQ ID NO: 6001 - DNA, 20 bp, Artificial Sequence
  Description of Artificial Sequence: Synthetic oligonucleotide
tctctcctgacagtcccata

SEQ ID NO: 6002 - DNA, 20 bp, Artificial Sequence
  Description of Artificial Sequence: Synthetic oligonucleotide
ctctcctgacagtcccatag

SEQ ID NO: 6003 - DNA, 20 bp, Artificial Sequence
  Description of Artificial Sequence: Synthetic oligonucleotide
tctcctgacagtcccatagc

SEQ ID NO: 6004 - DNA, 20 bp, Artificial Sequence
  Description of Artificial Sequence: Synthetic oligonucleotide
ctcctgacagtcccatagcc

SEQ ID NO: 6005 - DNA, 20 bp, Artificial Sequence
  Description of Artificial Sequence: Synthetic oligonucleotide
tcctgacagtcccatagcca

SEQ ID NO: 6006 - DNA, 20 bp, Artificial Sequence
  Description of Artificial Sequence: Synthetic oligonucleotide
cctgacagtcccatagccaa

SEQ ID NO: 6007 - DNA, 20 bp, Artificial Sequence
  Description of Artificial Sequence: Synthetic oligonucleotide
ctgacagtcccatagccaaa

SEQ ID NO: 6008 - DNA, 20 bp, Artificial Sequence
  Description of Artificial Sequence: Synthetic oligonucleotide
tgacagtcccatagccaaac

SEQ ID NO: 6009 - DNA, 20 bp, Artificial Sequence
  Description of Artificial Sequence: Synthetic oligonucleotide
gacagtcccatagccaaaca

SEQ ID NO: 6010 - DNA, 20 bp, Artificial Sequence
  Description of Artificial Sequence: Synthetic oligonucleotide
acagtcccatagccaaacat

SEQ ID NO: 6011 - DNA, 20 bp, Artificial Sequence
  Description of Artificial Sequence: Synthetic oligonucleotide
cagtcccatagccaaacatc

SEQ ID NO: 6012 - DNA, 20 bp, Artificial Sequence
  Description of Artificial Sequence: Synthetic oligonucleotide
agtcccatagccaaacatct

SEQ ID NO: 6013 - DNA, 20 bp, Artificial Sequence
  Description of Artificial Sequence: Synthetic oligonucleotide
gtcccatagccaaacatctt

SEQ ID NO: 6014 - DNA, 20 bp, Artificial Sequence
  Description of Artificial Sequence: Synthetic oligonucleotide
tcccatagccaaacatcttt

SEQ ID NO: 6015 - DNA, 20 bp, Artificial Sequence
  Description of Artificial Sequence: Synthetic oligonucleotide
cccatagccaaacatctttt

SEQ ID NO: 6016 - DNA, 20 bp, Artificial Sequence
  Description of Artificial Sequence: Synthetic oligonucleotide
ccatagccaaacatcttttt

SEQ ID NO: 6017 - DNA, 20 bp, Artificial Sequence
  Description of Artificial Sequence: Synthetic oligonucleotide
catagccaaacatcttttta

SEQ ID NO: 6018 - DNA, 20 bp, Artificial Sequence
  Description of Artificial Sequence: Synthetic oligonucleotide
atagccaaacatctttttat

SEQ ID NO: 6019 - DNA, 20 bp, Artificial Sequence
  Description of Artificial Sequence: Synthetic oligonucleotide
tagccaaacatctttttata

SEQ ID NO: 6020 - DNA, 20 bp, Artificial Sequence
  Description of Artificial Sequence: Synthetic oligonucleotide
agccaaacatctttttatag

SEQ ID NO: 6021 - DNA, 20 bp, Artificial Sequence
  Description of Artificial Sequence: Synthetic oligonucleotide
gccaaacatctttttatagg

SEQ ID NO: 6022 - DNA, 20 bp, Artificial Sequence
  Description of Artificial Sequence: Synthetic oligonucleotide
ccaaacatctttttataggt

SEQ ID NO: 6023 - DNA, 20 bp, Artificial Sequence
  Description of Artificial Sequence: Synthetic oligonucleotide
caaacatctttttataggtg

SEQ ID NO: 6024 - DNA, 20 bp, Artificial Sequence
  Description of Artificial Sequence: Synthetic oligonucleotide
aaacatctttttataggtgt

SEQ ID NO: 6025 - DNA, 20 bp, Artificial Sequence
  Description of Artificial Sequence: Synthetic oligonucleotide
aacatctttttataggtgtg

SEQ ID NO: 6026 - DNA, 20 bp, Artificial Sequence
  Description of Artificial Sequence: Synthetic oligonucleotide
acatctttttataggtgtga

SEQ ID NO: 6027 - DNA, 20 bp, Artificial Sequence
  Description of Artificial Sequence: Synthetic oligonucleotide
catctttttataggtgtgaa

SEQ ID NO: 6028 - DNA, 20 bp, Artificial Sequence
  Description of Artificial Sequence: Synthetic oligonucleotide
atctttttataggtgtgaat

SEQ ID NO: 6029 - DNA, 20 bp, Artificial Sequence
  Description of Artificial Sequence: Synthetic oligonucleotide
tctttttataggtgtgaatc

SEQ ID NO: 6030 - DNA, 20 bp, Artificial Sequence
  Description of Artificial Sequence: Synthetic oligonucleotide
ctttttataggtgtgaatct

SEQ ID NO: 6031 - DNA, 20 bp, Artificial Sequence
  Description of Artificial Sequence: Synthetic oligonucleotide
tttttataggtgtgaatcta

SEQ ID NO: 6032 - DNA, 20 bp, Artificial Sequence
  Description of Artificial Sequence: Synthetic oligonucleotide
ttttataggtgtgaatctaa

SEQ ID NO: 6033 - DNA, 20 bp, Artificial Sequence
  Description of Artificial Sequence: Synthetic oligonucleotide
tttataggtgtgaatctaat

SEQ ID NO: 6034 - DNA, 20 bp, Artificial Sequence
  Description of Artificial Sequence: Synthetic oligonucleotide
ttataggtgtgaatctaata

SEQ ID NO: 6035 - DNA, 20 bp, Artificial Sequence
  Description of Artificial Sequence: Synthetic oligonucleotide
tataggtgtgaatctaataa

SEQ ID NO: 6036 - DNA, 20 bp, Artificial Sequence
  Description of Artificial Sequence: Synthetic oligonucleotide
ataggtgtgaatctaataag

SEQ ID NO: 6037 - DNA, 20 bp, Artificial Sequence
  Description of Artificial Sequence: Synthetic oligonucleotide
taggtgtgaatctaataaga

SEQ ID NO: 6038 - DNA, 20 bp, Artificial Sequence
  Description of Artificial Sequence: Synthetic oligonucleotide
aggtgtgaatctaataagac

SEQ ID NO: 6039 - DNA, 20 bp, Artificial Sequence
  Description of Artificial Sequence: Synthetic oligonucleotide
ggtgtgaatctaataagact

SEQ ID NO: 6040 - DNA, 20 bp, Artificial Sequence
  Description of Artificial Sequence: Synthetic oligonucleotide
gtgtgaatctaataagactt

SEQ ID NO: 6041 - DNA, 20 bp, Artificial Sequence
  Description of Artificial Sequence: Synthetic oligonucleotide
tgtgaatctaataagacttt

SEQ ID NO: 6042 - DNA, 20 bp, Artificial Sequence
  Description of Artificial Sequence: Synthetic oligonucleotide
gtgaatctaataagacttta

SEQ ID NO: 6043 - DNA, 20 bp, Artificial Sequence
  Description of Artificial Sequence: Synthetic oligonucleotide
tgaatctaataagactttat

SEQ ID NO: 6044 - DNA, 20 bp, Artificial Sequence
  Description of Artificial Sequence: Synthetic oligonucleotide
gaatctaataagactttatt

SEQ ID NO: 6045 - DNA, 20 bp, Artificial Sequence
  Description of Artificial Sequence: Synthetic oligonucleotide
aatctaataagactttatta

SEQ ID NO: 6046 - DNA, 20 bp, Artificial Sequence
  Description of Artificial Sequence: Synthetic oligonucleotide
atctaataagactttattac

SEQ ID NO: 6047 - DNA, 20 bp, Artificial Sequence
  Description of Artificial Sequence: Synthetic oligonucleotide
tctaataagactttattact

SEQ ID NO: 6048 - DNA, 20 bp, Artificial Sequence
  Description of Artificial Sequence: Synthetic oligonucleotide
ctaataagactttattactt

SEQ ID NO: 6049 - DNA, 20 bp, Artificial Sequence
  Description of Artificial Sequence: Synthetic oligonucleotide
taataagactttattacttg

SEQ ID NO: 6050 - DNA, 20 bp, Artificial Sequence
  Description of Artificial Sequence: Synthetic oligonucleotide
aataagactttattacttgt

SEQ ID NO: 6051 - DNA, 20 bp, Artificial Sequence
  Description of Artificial Sequence: Synthetic oligonucleotide
ataagactttattacttgtt

SEQ ID NO: 6052 - DNA, 20 bp, Artificial Sequence
  Description of Artificial Sequence: Synthetic oligonucleotide
taagactttattacttgttt

SEQ ID NO: 6053 - DNA, 20 bp, Artificial Sequence
  Description of Artificial Sequence: Synthetic oligonucleotide
aagactttattacttgttta

SEQ ID NO: 6054 - DNA, 20 bp, Artificial Sequence
  Description of Artificial Sequence: Synthetic oligonucleotide
agactttattacttgtttac

SEQ ID NO: 6055 - DNA, 20 bp, Artificial Sequence
  Description of Artificial Sequence: Synthetic oligonucleotide
gactttattacttgtttacc

SEQ ID NO: 6056 - DNA, 20 bp, Artificial Sequence
  Description of Artificial Sequence: Synthetic oligonucleotide
actttattacttgtttacct

SEQ ID NO: 6057 - DNA, 20 bp, Artificial Sequence
  Description of Artificial Sequence: Synthetic oligonucleotide
ctttattacttgtttacctc

SEQ ID NO: 6058 - DNA, 20 bp, Artificial Sequence
  Description of Artificial Sequence: Synthetic oligonucleotide
tttattacttgtttacctcc

SEQ ID NO: 6059 - DNA, 20 bp, Artificial Sequence
  Description of Artificial Sequence: Synthetic oligonucleotide
ttattacttgtttacctcca

SEQ ID NO: 6060 - DNA, 20 bp, Artificial Sequence
  Description of Artificial Sequence: Synthetic oligonucleotide
tattacttgtttacctccag

SEQ ID NO: 6061 - DNA, 20 bp, Artificial Sequence
  Description of Artificial Sequence: Synthetic oligonucleotide
attacttgtttacctccagt

SEQ ID NO: 6062 - DNA, 20 bp, Artificial Sequence
  Description of Artificial Sequence: Synthetic oligonucleotide
ttacttgtttacctccagtt

SEQ ID NO: 6063 - DNA, 20 bp, Artificial Sequence
  Description of Artificial Sequence: Synthetic oligonucleotide
tacttgtttacctccagttt

SEQ ID NO: 6064 - DNA, 20 bp, Artificial Sequence
  Description of Artificial Sequence: Synthetic oligonucleotide
acttgtttacctccagttta

SEQ ID NO: 6065 - DNA, 20 bp, Artificial Sequence
  Description of Artificial Sequence: Synthetic oligonucleotide
cttgtttacctccagtttac

SEQ ID NO: 6066 - DNA, 20 bp, Artificial Sequence
  Description of Artificial Sequence: Synthetic oligonucleotide
ttgtttacctccagtttact

SEQ ID NO: 6067 - DNA, 20 bp, Artificial Sequence
  Description of Artificial Sequence: Synthetic oligonucleotide
tgtttacctccagtttactg

SEQ ID NO: 6068 - DNA, 20 bp, Artificial Sequence
  Description of Artificial Sequence: Synthetic oligonucleotide
gtttacctccagtttactgt

SEQ ID NO: 6069 - DNA, 20 bp, Artificial Sequence
  Description of Artificial Sequence: Synthetic oligonucleotide
tttacctccagtttactgtg

SEQ ID NO: 6070 - DNA, 20 bp, Artificial Sequence
  Description of Artificial Sequence: Synthetic oligonucleotide
ttacctccagtttactgtgt

SEQ ID NO: 6071 - DNA, 20 bp, Artificial Sequence
  Description of Artificial Sequence: Synthetic oligonucleotide
tacctccagtttactgtgtt

SEQ ID NO: 6072 - DNA, 20 bp, Artificial Sequence
  Description of Artificial Sequence: Synthetic oligonucleotide
acctccagtttactgtgtta

SEQ ID NO: 6073 - DNA, 20 bp, Artificial Sequence
  Description of Artificial Sequence: Synthetic oligonucleotide
cctccagtttactgtgttaa

SEQ ID NO: 6074 - DNA, 20 bp, Artificial Sequence
  Description of Artificial Sequence: Synthetic oligonucleotide
ctccagtttactgtgttaac

SEQ ID NO: 6075 - DNA, 20 bp, Artificial Sequence
  Description of Artificial Sequence: Synthetic oligonucleotide
tccagtttactgtgttaacc

SEQ ID NO: 6076 - DNA, 20 bp, Artificial Sequence
  Description of Artificial Sequence: Synthetic oligonucleotide
ccagtttactgtgttaacct

SEQ ID NO: 6077 - DNA, 20 bp, Artificial Sequence
  Description of Artificial Sequence: Synthetic oligonucleotide
cagtttactgtgttaacctg

SEQ ID NO: 6078 - DNA, 20 bp, Artificial Sequence
  Description of Artificial Sequence: Synthetic oligonucleotide
agtttactgtgttaacctgg

SEQ ID NO: 6079 - DNA, 20 bp, Artificial Sequence
  Description of Artificial Sequence: Synthetic oligonucleotide
gtttactgtgttaacctggg

SEQ ID NO: 6080 - DNA, 20 bp, Artificial Sequence
  Description of Artificial Sequence: Synthetic oligonucleotide
tttactgtgttaacctggga

SEQ ID NO: 6081 - DNA, 20 bp, Artificial Sequence
  Description of Artificial Sequence: Synthetic oligonucleotide
ttactgtgttaacctgggaa

SEQ ID NO: 6082 - DNA, 20 bp, Artificial Sequence
  Description of Artificial Sequence: Synthetic oligonucleotide
tactgtgttaacctgggaat

SEQ ID NO: 6083 - DNA, 20 bp, Artificial Sequence
  Description of Artificial Sequence: Synthetic oligonucleotide
actgtgttaacctgggaatc

SEQ ID NO: 6084 - DNA, 20 bp, Artificial Sequence
  Description of Artificial Sequence: Synthetic oligonucleotide
ctgtgttaacctgggaatca

SEQ ID NO: 6085 - DNA, 20 bp, Artificial Sequence
  Description of Artificial Sequence: Synthetic oligonucleotide
tgtgttaacctgggaatcag

SEQ ID NO: 6086 - DNA, 20 bp, Artificial Sequence
  Description of Artificial Sequence: Synthetic oligonucleotide
gtgttaacctgggaatcaga

SEQ ID NO: 6087 - DNA, 20 bp, Artificial Sequence
  Description of Artificial Sequence: Synthetic oligonucleotide
tgttaacctgggaatcagaa

SEQ ID NO: 6088 - DNA, 20 bp, Artificial Sequence
  Description of Artificial Sequence: Synthetic oligonucleotide
gttaacctgggaatcagaaa

SEQ ID NO: 6089 - DNA, 20 bp, Artificial Sequence
  Description of Artificial Sequence: Synthetic oligonucleotide
ttaacctgggaatcagaaaa

SEQ ID NO: 6090 - DNA, 20 bp, Artificial Sequence
  Description of Artificial Sequence: Synthetic oligonucleotide
taacctgggaatcagaaaac

SEQ ID NO: 6091 - DNA, 20 bp, Artificial Sequence
  Description of Artificial Sequence: Synthetic oligonucleotide
aacctgggaatcagaaaaca

SEQ ID NO: 6092 - DNA, 20 bp, Artificial Sequence
  Description of Artificial Sequence: Synthetic oligonucleotide
acctgggaatcagaaaacaa

SEQ ID NO: 6093 - DNA, 20 bp, Artificial Sequence
  Description of Artificial Sequence: Synthetic oligonucleotide
cctgggaatcagaaaacaag

SEQ ID NO: 6094 - DNA, 20 bp, Artificial Sequence
  Description of Artificial Sequence: Synthetic oligonucleotide
ctgggaatcagaaaacaagg

SEQ ID NO: 6095 - DNA, 20 bp, Artificial Sequence
  Description of Artificial Sequence: Synthetic oligonucleotide
tgggaatcagaaaacaaggc

SEQ ID NO: 6096 - DNA, 20 bp, Artificial Sequence
  Description of Artificial Sequence: Synthetic oligonucleotide
gggaatcagaaaacaaggct

SEQ ID NO: 6097 - DNA, 20 bp, Artificial Sequence
  Description of Artificial Sequence: Synthetic oligonucleotide
ggaatcagaaaacaaggctc

SEQ ID NO: 6098 - DNA, 20 bp, Artificial Sequence
  Description of Artificial Sequence: Synthetic oligonucleotide
gaatcagaaaacaaggctcg

SEQ ID NO: 6099 - DNA, 20 bp, Artificial Sequence
  Description of Artificial Sequence: Synthetic oligonucleotide
aatcagaaaacaaggctcga

SEQ ID NO: 6100 - DNA, 20 bp, Artificial Sequence
  Description of Artificial Sequence: Synthetic oligonucleotide
atcagaaaacaaggctcgaa

SEQ ID NO: 6101 - DNA, 20 bp, Artificial Sequence
  Description of Artificial Sequence: Synthetic oligonucleotide
tcagaaaacaaggctcgaac

SEQ ID NO: 6102 - DNA, 20 bp, Artificial Sequence
  Description of Artificial Sequence: Synthetic oligonucleotide
cagaaaacaaggctcgaact

SEQ ID NO: 6103 - DNA, 20 bp, Artificial Sequence
  Description of Artificial Sequence: Synthetic oligonucleotide
agaaaacaaggctcgaactt

SEQ ID NO: 6104 - DNA, 20 bp, Artificial Sequence
  Description of Artificial Sequence: Synthetic oligonucleotide
gaaaacaaggctcgaacttc

SEQ ID NO: 6105 - DNA, 20 bp, Artificial Sequence
  Description of Artificial Sequence: Synthetic oligonucleotide
aaaacaaggctcgaacttct

SEQ ID NO: 6106 - DNA, 20 bp, Artificial Sequence
  Description of Artificial Sequence: Synthetic oligonucleotide
aaacaaggctcgaacttctt

SEQ ID NO: 6107 - DNA, 20 bp, Artificial Sequence
  Description of Artificial Sequence: Synthetic oligonucleotide
aacaaggctcgaacttcttt

SEQ ID NO: 6108 - DNA, 20 bp, Artificial Sequence
  Description of Artificial Sequence: Synthetic oligonucleotide
acaaggctcgaacttctttc

SEQ ID NO: 6109 - DNA, 20 bp, Artificial Sequence
  Description of Artificial Sequence: Synthetic oligonucleotide
caaggctcgaacttctttcc

SEQ ID NO: 6110 - DNA, 20 bp, Artificial Sequence
  Description of Artificial Sequence: Synthetic oligonucleotide
aaggctcgaacttctttcct

SEQ ID NO: 6111 - DNA, 20 bp, Artificial Sequence
  Description of Artificial Sequence: Synthetic oligonucleotide
aggctcgaacttctttcctg

SEQ ID NO: 6112 - DNA, 20 bp, Artificial Sequence
  Description of Artificial Sequence: Synthetic oligonucleotide
ggctcgaacttctttcctga

SEQ ID NO: 6113 - DNA, 20 bp, Artificial Sequence
  Description of Artificial Sequence: Synthetic oligonucleotide
gctcgaacttctttcctgat

SEQ ID NO: 6114 - DNA, 20 bp, Artificial Sequence
  Description of Artificial Sequence: Synthetic oligonucleotide
ctcgaacttctttcctgatt

SEQ ID NO: 6115 - DNA, 20 bp, Artificial Sequence
  Description of Artificial Sequence: Synthetic oligonucleotide
tcgaacttctttcctgattc

SEQ ID NO: 6116 - DNA, 20 bp, Artificial Sequence
  Description of Artificial Sequence: Synthetic oligonucleotide
cgaacttctttcctgattca

SEQ ID NO: 6117 - DNA, 20 bp, Artificial Sequence
  Description of Artificial Sequence: Synthetic oligonucleotide
gaacttctttcctgattcac

SEQ ID NO: 6118 - DNA, 20 bp, Artificial Sequence
  Description of Artificial Sequence: Synthetic oligonucleotide
aacttctttcctgattcacc

SEQ ID NO: 6119 - DNA, 20 bp, Artificial Sequence
  Description of Artificial Sequence: Synthetic oligonucleotide
acttctttcctgattcacca

SEQ ID NO: 6120 - DNA, 20 bp, Artificial Sequence
  Description of Artificial Sequence: Synthetic oligonucleotide
cttctttcctgattcaccat

SEQ ID NO: 6121 - DNA, 20 bp, Artificial Sequence
  Description of Artificial Sequence: Synthetic oligonucleotide
ttctttcctgattcaccata

SEQ ID NO: 6122 - DNA, 20 bp, Artificial Sequence
  Description of Artificial Sequence: Synthetic oligonucleotide
tctttcctgattcaccatat

SEQ ID NO: 6123 - DNA, 20 bp, Artificial Sequence
  Description of Artificial Sequence: Synthetic oligonucleotide
ctttcctgattcaccatatg

SEQ ID NO: 6124 - DNA, 20 bp, Artificial Sequence
  Description of Artificial Sequence: Synthetic oligonucleotide
tttcctgattcaccatatgg

SEQ ID NO: 6125 - DNA, 20 bp, Artificial Sequence
  Description of Artificial Sequence: Synthetic oligonucleotide
ttcctgattcaccatatggc

SEQ ID NO: 6126 - DNA, 20 bp, Artificial Sequence
  Description of Artificial Sequence: Synthetic oligonucleotide
tcctgattcaccatatggcc

SEQ ID NO: 6127 - DNA, 20 bp, Artificial Sequence
  Description of Artificial Sequence: Synthetic oligonucleotide
cctgattcaccatatggcct

SEQ ID NO: 6128 - DNA, 20 bp, Artificial Sequence
  Description of Artificial Sequence: Synthetic oligonucleotide
ctgattcaccatatggcctt

SEQ ID NO: 6129 - DNA, 20 bp, Artificial Sequence
  Description of Artificial Sequence: Synthetic oligonucleotide
tgattcaccatatggccttg

SEQ ID NO: 6130 - DNA, 20 bp, Artificial Sequence
  Description of Artificial Sequence: Synthetic oligonucleotide
gattcaccatatggccttga

SEQ ID NO: 6131 - DNA, 20 bp, Artificial Sequence
  Description of Artificial Sequence: Synthetic oligonucleotide
attcaccatatggccttgat

SEQ ID NO: 6132 - DNA, 20 bp, Artificial Sequence
  Description of Artificial Sequence: Synthetic oligonucleotide
ttcaccatatggccttgatt

SEQ ID NO: 6133 - DNA, 20 bp, Artificial Sequence
  Description of Artificial Sequence: Synthetic oligonucleotide
tcaccatatggccttgatta

SEQ ID NO: 6134 - DNA, 20 bp, Artificial Sequence
  Description of Artificial Sequence: Synthetic oligonucleotide
caccatatggccttgattag

SEQ ID NO: 6135 - DNA, 20 bp, Artificial Sequence
  Description of Artificial Sequence: Synthetic oligonucleotide
accatatggccttgattagt

SEQ ID NO: 6136 - DNA, 20 bp, Artificial Sequence
  Description of Artificial Sequence: Synthetic oligonucleotide
ccatatggccttgattagtc

SEQ ID NO: 6137 - DNA, 20 bp, Artificial Sequence
  Description of Artificial Sequence: Synthetic oligonucleotide
catatggccttgattagtct

SEQ ID NO: 6138 - DNA, 20 bp, Artificial Sequence
  Description of Artificial Sequence: Synthetic oligonucleotide
atatggccttgattagtctc

SEQ ID NO: 6139 - DNA, 20 bp, Artificial Sequence
  Description of Artificial Sequence: Synthetic oligonucleotide
tatggccttgattagtctct

SEQ ID NO: 6140 - DNA, 20 bp, Artificial Sequence
  Description of Artificial Sequence: Synthetic oligonucleotide
atggccttgattagtctctc

SEQ ID NO: 6141 - DNA, 20 bp, Artificial Sequence
  Description of Artificial Sequence: Synthetic oligonucleotide
tggccttgattagtctctct

SEQ ID NO: 6142 - DNA, 20 bp, Artificial Sequence
  Description of Artificial Sequence: Synthetic oligonucleotide
ggccttgattagtctctctt

SEQ ID NO: 6143 - DNA, 20 bp, Artificial Sequence
  Description of Artificial Sequence: Synthetic oligonucleotide
gccttgattagtctctcttt

SEQ ID NO: 6144 - DNA, 20 bp, Artificial Sequence
  Description of Artificial Sequence: Synthetic oligonucleotide
ccttgattagtctctctttc

SEQ ID NO: 6145 - DNA, 20 bp, Artificial Sequence
  Description of Artificial Sequence: Synthetic oligonucleotide
cttgattagtctctctttct

SEQ ID NO: 6146 - DNA, 20 bp, Artificial Sequence
  Description of Artificial Sequence: Synthetic oligonucleotide
ttgattagtctctctttcta

SEQ ID NO: 6147 - DNA, 20 bp, Artificial Sequence
  Description of Artificial Sequence: Synthetic oligonucleotide
tgattagtctctctttctat

SEQ ID NO: 6148 - DNA, 20 bp, Artificial Sequence
  Description of Artificial Sequence: Synthetic oligonucleotide
gattagtctctctttctata

SEQ ID NO: 6149 - DNA, 20 bp, Artificial Sequence
  Description of Artificial Sequence: Synthetic oligonucleotide
attagtctctctttctatat

SEQ ID NO: 6150 - DNA, 20 bp, Artificial Sequence
  Description of Artificial Sequence: Synthetic oligonucleotide
ttagtctctctttctatatt

SEQ ID NO: 6151 - DNA, 20 bp, Artificial Sequence
  Description of Artificial Sequence: Synthetic oligonucleotide
tagtctctctttctatattc

SEQ ID NO: 6152 - DNA, 20 bp, Artificial Sequence
  Description of Artificial Sequence: Synthetic oligonucleotide
agtctctctttctatattcc

SEQ ID NO: 6153 - DNA, 20 bp, Artificial Sequence
  Description of Artificial Sequence: Synthetic oligonucleotide
gtctctctttctatattcct

SEQ ID NO: 6154 - DNA, 20 bp, Artificial Sequence
  Description of Artificial Sequence: Synthetic oligonucleotide
tctctctttctatattcctc

SEQ ID NO: 6155 - DNA, 20 bp, Artificial Sequence
  Description of Artificial Sequence: Synthetic oligonucleotide
ctctctttctatattcctca

SEQ ID NO: 6156 - DNA, 20 bp, Artificial Sequence
  Description of Artificial Sequence: Synthetic oligonucleotide
tctctttctatattcctcac

SEQ ID NO: 6157 - DNA, 20 bp, Artificial Sequence
  Description of Artificial Sequence: Synthetic oligonucleotide
ctctttctatattcctcact

SEQ ID NO: 6158 - DNA, 20 bp, Artificial Sequence
  Description of Artificial Sequence: Synthetic oligonucleotide
tctttctatattcctcactt

SEQ ID NO: 6159 - DNA, 20 bp, Artificial Sequence
  Description of Artificial Sequence: Synthetic oligonucleotide
ctttctatattcctcacttt

SEQ ID NO: 6160 - DNA, 20 bp, Artificial Sequence
  Description of Artificial Sequence: Synthetic oligonucleotide
tttctatattcctcactttc

SEQ ID NO: 6161 - DNA, 20 bp, Artificial Sequence
  Description of Artificial Sequence: Synthetic oligonucleotide
ttctatattcctcactttcc

SEQ ID NO: 6162 - DNA, 20 bp, Artificial Sequence
  Description of Artificial Sequence: Synthetic oligonucleotide
tctatattcctcactttcct

SEQ ID NO: 6163 - DNA, 20 bp, Artificial Sequence
  Description of Artificial Sequence: Synthetic oligonucleotide
ctatattcctcactttcctg

SEQ ID NO: 6164 - DNA, 20 bp, Artificial Sequence
  Description of Artificial Sequence: Synthetic oligonucleotide
tatattcctcactttcctgc

SEQ ID NO: 6165 - DNA, 20 bp, Artificial Sequence
  Description of Artificial Sequence: Synthetic oligonucleotide
atattcctcactttcctgct

SEQ ID NO: 6166 - DNA, 20 bp, Artificial Sequence
  Description of Artificial Sequence: Synthetic oligonucleotide
tattcctcactttcctgctt

SEQ ID NO: 6167 - DNA, 20 bp, Artificial Sequence
  Description of Artificial Sequence: Synthetic oligonucleotide
attcctcactttcctgctta

SEQ ID NO: 6168 - DNA, 20 bp, Artificial Sequence
  Description of Artificial Sequence: Synthetic oligonucleotide
ttcctcactttcctgcttat

SEQ ID NO: 6169 - DNA, 20 bp, Artificial Sequence
  Description of Artificial Sequence: Synthetic oligonucleotide
tcctcactttcctgcttata

SEQ ID NO: 6170 - DNA, 20 bp, Artificial Sequence
  Description of Artificial Sequence: Synthetic oligonucleotide
cctcactttcctgcttataa

SEQ ID NO: 6171 - DNA, 20 bp, Artificial Sequence
  Description of Artificial Sequence: Synthetic oligonucleotide
ctcactttcctgcttataag

SEQ ID NO: 6172 - DNA, 20 bp, Artificial Sequence
  Description of Artificial Sequence: Synthetic oligonucleotide
tcactttcctgcttataagg

SEQ ID NO: 6173 - DNA, 20 bp, Artificial Sequence
  Description of Artificial Sequence: Synthetic oligonucleotide
cactttcctgcttataaggt

SEQ ID NO: 6174 - DNA, 20 bp, Artificial Sequence
  Description of Artificial Sequence: Synthetic oligonucleotide
actttcctgcttataaggtg

SEQ ID NO: 6175 - DNA, 20 bp, Artificial Sequence
  Description of Artificial Sequence: Synthetic oligonucleotide
ctttcctgcttataaggtgc

SEQ ID NO: 6176 - DNA, 20 bp, Artificial Sequence
  Description of Artificial Sequence: Synthetic oligonucleotide
tttcctgcttataaggtgca

SEQ ID NO: 6177 - DNA, 20 bp, Artificial Sequence
  Description of Artificial Sequence: Synthetic oligonucleotide
ttcctgcttataaggtgcag

SEQ ID NO: 6178 - DNA, 20 bp, Artificial Sequence
  Description of Artificial Sequence: Synthetic oligonucleotide
tcctgcttataaggtgcagc

SEQ ID NO: 6179 - DNA, 20 bp, Artificial Sequence
  Description of Artificial Sequence: Synthetic oligonucleotide
cctgcttataaggtgcagct

SEQ ID NO: 6180 - DNA, 20 bp, Artificial Sequence
  Description of Artificial Sequence: Synthetic oligonucleotide
ctgcttataaggtgcagcta

SEQ ID NO: 6181 - DNA, 20 bp, Artificial Sequence
  Description of Artificial Sequence: Synthetic oligonucleotide
tgcttataaggtgcagctat

SEQ ID NO: 6182 - DNA, 20 bp, Artificial Sequence
  Description of Artificial Sequence: Synthetic oligonucleotide
gcttataaggtgcagctatg

SEQ ID NO: 6183 - DNA, 20 bp, Artificial Sequence
  Description of Artificial Sequence: Synthetic oligonucleotide
cttataaggtgcagctatgt

SEQ ID NO: 6184 - DNA, 20 bp, Artificial Sequence
  Description of Artificial Sequence: Synthetic oligonucleotide
ttataaggtgcagctatgtt

SEQ ID NO: 6185 - DNA, 20 bp, Artificial Sequence
  Description of Artificial Sequence: Synthetic oligonucleotide
tataaggtgcagctatgttt

SEQ ID NO: 6186 - DNA, 20 bp, Artificial Sequence
  Description of Artificial Sequence: Synthetic oligonucleotide
ataaggtgcagctatgtttt

SEQ ID NO: 6187 - DNA, 20 bp, Artificial Sequence
  Description of Artificial Sequence: Synthetic oligonucleotide
taaggtgcagctatgttttt

SEQ ID NO: 6188 - DNA, 20 bp, Artificial Sequence
  Description of Artificial Sequence: Synthetic oligonucleotide
aaggtgcagctatgtttttg

SEQ ID NO: 6189 - DNA, 20 bp, Artificial Sequence
  Description of Artificial Sequence: Synthetic oligonucleotide
aggtgcagctatgtttttgc

SEQ ID NO: 6190 - DNA, 20 bp, Artificial Sequence
  Description of Artificial Sequence: Synthetic oligonucleotide
ggtgcagctatgtttttgct

SEQ ID NO: 6191 - DNA, 20 bp, Artificial Sequence
  Description of Artificial Sequence: Synthetic oligonucleotide
gtgcagctatgtttttgctg

SEQ ID NO: 6192 - DNA, 20 bp, Artificial Sequence
  Description of Artificial Sequence: Synthetic oligonucleotide
tgcagctatgtttttgctga

SEQ ID NO: 6193 - DNA, 20 bp, Artificial Sequence
  Description of Artificial Sequence: Synthetic oligonucleotide
gcagctatgtttttgctgaa

SEQ ID NO: 6194 - DNA, 20 bp, Artificial Sequence
  Description of Artificial Sequence: Synthetic oligonucleotide
cagctatgtttttgctgaat

SEQ ID NO: 6195 - DNA, 20 bp, Artificial Sequence
  Description of Artificial Sequence: Synthetic oligonucleotide
agctatgtttttgctgaatc

SEQ ID NO: 6196 - DNA, 20 bp, Artificial Sequence
  Description of Artificial Sequence: Synthetic oligonucleotide
gctatgtttttgctgaatcc

SEQ ID NO: 6197 - DNA, 20 bp, Artificial Sequence
  Description of Artificial Sequence: Synthetic oligonucleotide
ctatgtttttgctgaatccc

SEQ ID NO: 6198 - DNA, 20 bp, Artificial Sequence
  Description of Artificial Sequence: Synthetic oligonucleotide
tatgtttttgctgaatccca

SEQ ID NO: 6199 - DNA, 20 bp, Artificial Sequence
  Description of Artificial Sequence: Synthetic oligonucleotide
atgtttttgctgaatcccac

SEQ ID NO: 6200 - DNA, 20 bp, Artificial Sequence
  Description of Artificial Sequence: Synthetic oligonucleotide
tgtttttgctgaatcccaca

SEQ ID NO: 6201 - DNA, 20 bp, Artificial Sequence
  Description of Artificial Sequence: Synthetic oligonucleotide
gtttttgctgaatcccacac

SEQ ID NO: 6202 - DNA, 20 bp, Artificial Sequence
  Description of Artificial Sequence: Synthetic oligonucleotide
tttttgctgaatcccacaca

SEQ ID NO: 6203 - DNA, 20 bp, Artificial Sequence
  Description of Artificial Sequence: Synthetic oligonucleotide
ttttgctgaatcccacacag

SEQ ID NO: 6204 - DNA, 20 bp, Artificial Sequence
  Description of Artificial Sequence: Synthetic oligonucleotide
tttgctgaatcccacacaga

SEQ ID NO: 6205 - DNA, 20 bp, Artificial Sequence
  Description of Artificial Sequence: Synthetic oligonucleotide
ttgctgaatcccacacagag

SEQ ID NO: 6206 - DNA, 20 bp, Artificial Sequence
  Description of Artificial Sequence: Synthetic oligonucleotide
tgctgaatcccacacagagc

SEQ ID NO: 6207 - DNA, 20 bp, Artificial Sequence
  Description of Artificial Sequence: Synthetic oligonucleotide
gctgaatcccacacagagct

SEQ ID NO: 6208 - DNA, 20 bp, Artificial Sequence
  Description of Artificial Sequence: Synthetic oligonucleotide
ctgaatcccacacagagctg

SEQ ID NO: 6209 - DNA, 20 bp, Artificial Sequence
  Description of Artificial Sequence: Synthetic oligonucleotide
tgaatcccacacagagctgc

SEQ ID NO: 6210 - DNA, 20 bp, Artificial Sequence
  Description of Artificial Sequence: Synthetic oligonucleotide
gaatcccacacagagctgct

SEQ ID NO: 6211 - DNA, 20 bp, Artificial Sequence
  Description of Artificial Sequence: Synthetic oligonucleotide
aatcccacacagagctgctg

SEQ ID NO: 6212 - DNA, 20 bp, Artificial Sequence
  Description of Artificial Sequence: Synthetic oligonucleotide
atcccacacagagctgctgt

SEQ ID NO: 6213 - DNA, 20 bp, Artificial Sequence
  Description of Artificial Sequence: Synthetic oligonucleotide
tcccacacagagctgctgta

SEQ ID NO: 6214 - DNA, 20 bp, Artificial Sequence
  Description of Artificial Sequence: Synthetic oligonucleotide
cccacacagagctgctgtaa

SEQ ID NO: 6215 - DNA, 20 bp, Artificial Sequence
  Description of Artificial Sequence: Synthetic oligonucleotide
ccacacagagctgctgtaag

SEQ ID NO: 6216 - DNA, 20 bp, Artificial Sequence
  Description of Artificial Sequence: Synthetic oligonucleotide
cacacagagctgctgtaaga

SEQ ID NO: 6217 - DNA, 20 bp, Artificial Sequence
  Description of Artificial Sequence: Synthetic oligonucleotide
acacagagctgctgtaagag

SEQ ID NO: 6218 - DNA, 20 bp, Artificial Sequence
  Description of Artificial Sequence: Synthetic oligonucleotide
cacagagctgctgtaagaga

SEQ ID NO: 6219 - DNA, 20 bp, Artificial Sequence
  Description of Artificial Sequence: Synthetic oligonucleotide
acagagctgctgtaagagaa

SEQ ID NO: 6220 - DNA, 20 bp, Artificial Sequence
  Description of Artificial Sequence: Synthetic oligonucleotide
cagagctgctgtaagagaaa

SEQ ID NO: 6221 - DNA, 20 bp, Artificial Sequence
  Description of Artificial Sequence: Synthetic oligonucleotide
agagctgctgtaagagaaac

SEQ ID NO: 6222 - DNA, 20 bp, Artificial Sequence
  Description of Artificial Sequence: Synthetic oligonucleotide
gagctgctgtaagagaaaca

SEQ ID NO: 6223 - DNA, 20 bp, Artificial Sequence
  Description of Artificial Sequence: Synthetic oligonucleotide
agctgctgtaagagaaacat

SEQ ID NO: 6224 - DNA, 20 bp, Artificial Sequence
  Description of Artificial Sequence: Synthetic oligonucleotide
gctgctgtaagagaaacatg

SEQ ID NO: 6225 - DNA, 20 bp, Artificial Sequence
  Description of Artificial Sequence: Synthetic oligonucleotide
ctgctgtaagagaaacatga

SEQ ID NO: 6226 - DNA, 20 bp, Artificial Sequence
  Description of Artificial Sequence: Synthetic oligonucleotide
tgctgtaagagaaacatgag

SEQ ID NO: 6227 - DNA, 20 bp, Artificial Sequence
  Description of Artificial Sequence: Synthetic oligonucleotide
gctgtaagagaaacatgagg

SEQ ID NO: 6228 - DNA, 20 bp, Artificial Sequence
  Description of Artificial Sequence: Synthetic oligonucleotide
ctgtaagagaaacatgagga

SEQ ID NO: 6229 - DNA, 20 bp, Artificial Sequence
  Description of Artificial Sequence: Synthetic oligonucleotide
tgtaagagaaacatgaggat

SEQ ID NO: 6230 - DNA, 20 bp, Artificial Sequence
  Description of Artificial Sequence: Synthetic oligonucleotide
gtaagagaaacatgaggata

SEQ ID NO: 6231 - DNA, 20 bp, Artificial Sequence
  Description of Artificial Sequence: Synthetic oligonucleotide
taagagaaacatgaggatat

SEQ ID NO: 6232 - DNA, 20 bp, Artificial Sequence
  Description of Artificial Sequence: Synthetic oligonucleotide
aagagaaacatgaggatata

SEQ ID NO: 6233 - DNA, 20 bp, Artificial Sequence
  Description of Artificial Sequence: Synthetic oligonucleotide
agagaaacatgaggatatag

SEQ ID NO: 6234 - DNA, 20 bp, Artificial Sequence
  Description of Artificial Sequence: Synthetic oligonucleotide
gagaaacatgaggatatagt

SEQ ID NO: 6235 - DNA, 20 bp, Artificial Sequence
  Description of Artificial Sequence: Synthetic oligonucleotide
agaaacatgaggatatagtg

SEQ ID NO: 6236 - DNA, 20 bp, Artificial Sequence
  Description of Artificial Sequence: Synthetic oligonucleotide
gaaacatgaggatatagtga

SEQ ID NO: 6237 - DNA, 20 bp, Artificial Sequence
  Description of Artificial Sequence: Synthetic oligonucleotide
aaacatgaggatatagtgag

SEQ ID NO: 6238 - DNA, 20 bp, Artificial Sequence
  Description of Artificial Sequence: Synthetic oligonucleotide
aacatgaggatatagtgagt

SEQ ID NO: 6239 - DNA, 20 bp, Artificial Sequence
  Description of Artificial Sequence: Synthetic oligonucleotide
acatgaggatatagtgagtg

SEQ ID NO: 6240 - DNA, 20 bp, Artificial Sequence
  Description of Artificial Sequence: Synthetic oligonucleotide
catgaggatatagtgagtgc

SEQ ID NO: 6241 - DNA, 20 bp, Artificial Sequence
  Description of Artificial Sequence: Synthetic oligonucleotide
atgaggatatagtgagtgct

SEQ ID NO: 6242 - DNA, 20 bp, Artificial Sequence
  Description of Artificial Sequence: Synthetic oligonucleotide
tgaggatatagtgagtgctt

SEQ ID NO: 6243 - DNA, 20 bp, Artificial Sequence
  Description of Artificial Sequence: Synthetic oligonucleotide
gaggatatagtgagtgcttt

SEQ ID NO: 6244 - DNA, 20 bp, Artificial Sequence
  Description of Artificial Sequence: Synthetic oligonucleotide
aggatatagtgagtgctttc

SEQ ID NO: 6245 - DNA, 20 bp, Artificial Sequence
  Description of Artificial Sequence: Synthetic oligonucleotide
ggatatagtgagtgctttca

SEQ ID NO: 6246 - DNA, 20 bp, Artificial Sequence
  Description of Artificial Sequence: Synthetic oligonucleotide
gatatagtgagtgctttcag

SEQ ID NO: 6247 - DNA, 20 bp, Artificial Sequence
  Description of Artificial Sequence: Synthetic oligonucleotide
atatagtgagtgctttcaga

SEQ ID NO: 6248 - DNA, 20 bp, Artificial Sequence
  Description of Artificial Sequence: Synthetic oligonucleotide
tatagtgagtgctttcagac

SEQ ID NO: 6249 - DNA, 20 bp, Artificial Sequence
  Description of Artificial Sequence: Synthetic oligonucleotide
atagtgagtgctttcagacc

SEQ ID NO: 6250 - DNA, 20 bp, Artificial Sequence
  Description of Artificial Sequence: Synthetic oligonucleotide
tagtgagtgctttcagacct

SEQ ID NO: 6251 - DNA, 20 bp, Artificial Sequence
  Description of Artificial Sequence: Synthetic oligonucleotide
agtgagtgctttcagacctt

SEQ ID NO: 6252 - DNA, 20 bp, Artificial Sequence
  Description of Artificial Sequence: Synthetic oligonucleotide
gtgagtgctttcagaccttc

SEQ ID NO: 6253 - DNA, 20 bp, Artificial Sequence
  Description of Artificial Sequence: Synthetic oligonucleotide
tgagtgctttcagaccttca

SEQ ID NO: 6254 - DNA, 20 bp, Artificial Sequence
  Description of Artificial Sequence: Synthetic oligonucleotide
gagtgctttcagaccttcag

SEQ ID NO: 6255 - DNA, 20 bp, Artificial Sequence
  Description of Artificial Sequence: Synthetic oligonucleotide
agtgctttcagaccttcagc

SEQ ID NO: 6256 - DNA, 20 bp, Artificial Sequence
  Description of Artificial Sequence: Synthetic oligonucleotide
gtgctttcagaccttcagca

SEQ ID NO: 6257 - DNA, 20 bp, Artificial Sequence
  Description of Artificial Sequence: Synthetic oligonucleotide
tgctttcagaccttcagcaa

SEQ ID NO: 6258 - DNA, 20 bp, Artificial Sequence
  Description of Artificial Sequence: Synthetic oligonucleotide
gctttcagaccttcagcaag

SEQ ID NO: 6259 - DNA, 20 bp, Artificial Sequence
  Description of Artificial Sequence: Synthetic oligonucleotide
ctttcagaccttcagcaagg

SEQ ID NO: 6260 - DNA, 20 bp, Artificial Sequence
  Description of Artificial Sequence: Synthetic oligonucleotide
tttcagaccttcagcaaggg

SEQ ID NO: 6261 - DNA, 20 bp, Artificial Sequence
  Description of Artificial Sequence: Synthetic oligonucleotide
ttcagaccttcagcaagggt

SEQ ID NO: 6262 - DNA, 20 bp, Artificial Sequence
  Description of Artificial Sequence: Synthetic oligonucleotide
tcagaccttcagcaagggtc

SEQ ID NO: 6263 - DNA, 20 bp, Artificial Sequence
  Description of Artificial Sequence: Synthetic oligonucleotide
cagaccttcagcaagggtcc

SEQ ID NO: 6264 - DNA, 20 bp, Artificial Sequence
  Description of Artificial Sequence: Synthetic oligonucleotide
agaccttcagcaagggtccc

SEQ ID NO: 6265 - DNA, 20 bp, Artificial Sequence
  Description of Artificial Sequence: Synthetic oligonucleotide
gaccttcagcaagggtcccc

SEQ ID NO: 6266 - DNA, 20 bp, Artificial Sequence
  Description of Artificial Sequence: Synthetic oligonucleotide
accttcagcaagggtcccca

SEQ ID NO: 6267 - DNA, 20 bp, Artificial Sequence
  Description of Artificial Sequence: Synthetic oligonucleotide
ccttcagcaagggtccccaa

SEQ ID NO: 6268 - DNA, 20 bp, Artificial Sequence
  Description of Artificial Sequence: Synthetic oligonucleotide
cttcagcaagggtccccaaa

SEQ ID NO: 6269 - DNA, 20 bp, Artificial Sequence
  Description of Artificial Sequence: Synthetic oligonucleotide
ttcagcaagggtccccaaac

SEQ ID NO: 6270 - DNA, 20 bp, Artificial Sequence
  Description of Artificial Sequence: Synthetic oligonucleotide
tcagcaagggtccccaaaca

SEQ ID NO: 6271 - DNA, 20 bp, Artificial Sequence
  Description of Artificial Sequence: Synthetic oligonucleotide
cagcaagggtccccaaacag

SEQ ID NO: 6272 - DNA, 20 bp, Artificial Sequence
  Description of Artificial Sequence: Synthetic oligonucleotide
agcaagggtccccaaacagt

SEQ ID NO: 6273 - DNA, 20 bp, Artificial Sequence
  Description of Artificial Sequence: Synthetic oligonucleotide
gcaagggtccccaaacagta

SEQ ID NO: 6274 - DNA, 20 bp, Artificial Sequence
  Description of Artificial Sequence: Synthetic oligonucleotide
caagggtccccaaacagtat

SEQ ID NO: 6275 - DNA, 20 bp, Artificial Sequence
  Description of Artificial Sequence: Synthetic oligonucleotide
aagggtccccaaacagtatc

SEQ ID NO: 6276 - DNA, 20 bp, Artificial Sequence
  Description of Artificial Sequence: Synthetic oligonucleotide
agggtccccaaacagtatca

SEQ ID NO: 6277 - DNA, 20 bp, Artificial Sequence
  Description of Artificial Sequence: Synthetic oligonucleotide
gggtccccaaacagtatcag

SEQ ID NO: 6278 - DNA, 20 bp, Artificial Sequence
  Description of Artificial Sequence: Synthetic oligonucleotide
ggtccccaaacagtatcagt

SEQ ID NO: 6279 - DNA, 20 bp, Artificial Sequence
  Description of Artificial Sequence: Synthetic oligonucleotide
gtccccaaacagtatcagta

SEQ ID NO: 6280 - DNA, 20 bp, Artificial Sequence
  Description of Artificial Sequence: Synthetic oligonucleotide
tccccaaacagtatcagtaa

SEQ ID NO: 6281 - DNA, 20 bp, Artificial Sequence
  Description of Artificial Sequence: Synthetic oligonucleotide
ccccaaacagtatcagtaag

SEQ ID NO: 6282 - DNA, 20 bp, Artificial Sequence
  Description of Artificial Sequence: Synthetic oligonucleotide
cccaaacagtatcagtaaga

SEQ ID NO: 6283 - DNA, 20 bp, Artificial Sequence
  Description of Artificial Sequence: Synthetic oligonucleotide
ccaaacagtatcagtaagat

SEQ ID NO: 6284 - DNA, 20 bp, Artificial Sequence
  Description of Artificial Sequence: Synthetic oligonucleotide
caaacagtatcagtaagatt

SEQ ID NO: 6285 - DNA, 20 bp, Artificial Sequence
  Description of Artificial Sequence: Synthetic oligonucleotide
aaacagtatcagtaagattt

SEQ ID NO: 6286 - DNA, 20 bp, Artificial Sequence
  Description of Artificial Sequence: Synthetic oligonucleotide
aacagtatcagtaagatttg

SEQ ID NO: 6287 - DNA, 20 bp, Artificial Sequence
  Description of Artificial Sequence: Synthetic oligonucleotide
acagtatcagtaagatttgc

SEQ ID NO: 6288 - DNA, 20 bp, Artificial Sequence
  Description of Artificial Sequence: Synthetic oligonucleotide
cagtatcagtaagatttgca

SEQ ID NO: 6289 - DNA, 20 bp, Artificial Sequence
  Description of Artificial Sequence: Synthetic oligonucleotide
agtatcagtaagatttgcac

SEQ ID NO: 6290 - DNA, 20 bp, Artificial Sequence
  Description of Artificial Sequence: Synthetic oligonucleotide
gtatcagtaagatttgcacc

SEQ ID NO: 6291 - DNA, 20 bp, Artificial Sequence
  Description of Artificial Sequence: Synthetic oligonucleotide
tatcagtaagatttgcacct

SEQ ID NO: 6292 - DNA, 20 bp, Artificial Sequence
  Description of Artificial Sequence: Synthetic oligonucleotide
atcagtaagatttgcaccta

SEQ ID NO: 6293 - DNA, 20 bp, Artificial Sequence
  Description of Artificial Sequence: Synthetic oligonucleotide
tcagtaagatttgcacctaa

SEQ ID NO: 6294 - DNA, 20 bp, Artificial Sequence
  Description of Artificial Sequence: Synthetic oligonucleotide
cagtaagatttgcacctaaa

SEQ ID NO: 6295 - DNA, 20 bp, Artificial Sequence
  Description of Artificial Sequence: Synthetic oligonucleotide
agtaagatttgcacctaaag

SEQ ID NO: 6296 - DNA, 20 bp, Artificial Sequence
  Description of Artificial Sequence: Synthetic oligonucleotide
gtaagatttgcacctaaagg

SEQ ID NO: 6297 - DNA, 20 bp, Artificial Sequence
  Description of Artificial Sequence: Synthetic oligonucleotide
taagatttgcacctaaagga

SEQ ID NO: 6298 - DNA, 20 bp, Artificial Sequence
  Description of Artificial Sequence: Synthetic oligonucleotide
aagatttgcacctaaaggac

SEQ ID NO: 6299 - DNA, 20 bp, Artificial Sequence
  Description of Artificial Sequence: Synthetic oligonucleotide
agatttgcacctaaaggacc

SEQ ID NO: 6300 - DNA, 20 bp, Artificial Sequence
  Description of Artificial Sequence: Synthetic oligonucleotide
gatttgcacctaaaggacct

SEQ ID NO: 6301 - DNA, 20 bp, Artificial Sequence
  Description of Artificial Sequence: Synthetic oligonucleotide
atttgcacctaaaggacctc

SEQ ID NO: 6302 - DNA, 20 bp, Artificial Sequence
  Description of Artificial Sequence: Synthetic oligonucleotide
tttgcacctaaaggacctca

SEQ ID NO: 6303 - DNA, 20 bp, Artificial Sequence
  Description of Artificial Sequence: Synthetic oligonucleotide
ttgcacctaaaggacctcat

SEQ ID NO: 6304 - DNA, 20 bp, Artificial Sequence
  Description of Artificial Sequence: Synthetic oligonucleotide
tgcacctaaaggacctcatg

SEQ ID NO: 6305 - DNA, 20 bp, Artificial Sequence
  Description of Artificial Sequence: Synthetic oligonucleotide
gcacctaaaggacctcatgc

SEQ ID NO: 6306 - DNA, 20 bp, Artificial Sequence
  Description of Artificial Sequence: Synthetic oligonucleotide
cacctaaaggacctcatgct

SEQ ID NO: 6307 - DNA, 20 bp, Artificial Sequence
  Description of Artificial Sequence: Synthetic oligonucleotide
acctaaaggacctcatgctc

SEQ ID NO: 6308 - DNA, 20 bp, Artificial Sequence
  Description of Artificial Sequence: Synthetic oligonucleotide
cctaaaggacctcatgctcg

SEQ ID NO: 6309 - DNA, 20 bp, Artificial Sequence
  Description of Artificial Sequence: Synthetic oligonucleotide
ctaaaggacctcatgctcgg

SEQ ID NO: 6310 - DNA, 20 bp, Artificial Sequence
  Description of Artificial Sequence: Synthetic oligonucleotide
taaaggacctcatgctcggc

SEQ ID NO: 6311 - DNA, 20 bp, Artificial Sequence
  Description of Artificial Sequence: Synthetic oligonucleotide
aaaggacctcatgctcggcc

SEQ ID NO: 6312 - DNA, 20 bp, Artificial Sequence
  Description of Artificial Sequence: Synthetic oligonucleotide
aaggacctcatgctcggcca

SEQ ID NO: 6313 - DNA, 20 bp, Artificial Sequence
  Description of Artificial Sequence: Synthetic oligonucleotide
aggacctcatgctcggccag

SEQ ID NO: 6314 - DNA, 20 bp, Artificial Sequence
  Description of Artificial Sequence: Synthetic oligonucleotide
ggacctcatgctcggccaga

SEQ ID NO: 6315 - DNA, 20 bp, Artificial Sequence
  Description of Artificial Sequence: Synthetic oligonucleotide
gacctcatgctcggccagag

SEQ ID NO: 6316 - DNA, 20 bp, Artificial Sequence
  Description of Artificial Sequence: Synthetic oligonucleotide
acctcatgctcggccagagc

SEQ ID NO: 6317 - DNA, 20 bp, Artificial Sequence
  Description of Artificial Sequence: Synthetic oligonucleotide
cctcatgctcggccagagca

SEQ ID NO: 6318 - DNA, 20 bp, Artificial Sequence
  Description of Artificial Sequence: Synthetic oligonucleotide
ctcatgctcggccagagcag

SEQ ID NO: 6319 - DNA, 20 bp, Artificial Sequence
  Description of Artificial Sequence: Synthetic oligonucleotide
tcatgctcggccagagcaga

SEQ ID NO: 6320 - DNA, 20 bp, Artificial Sequence
  Description of Artificial Sequence: Synthetic oligonucleotide
catgctcggccagagcagag

SEQ ID NO: 6321 - DNA, 20 bp, Artificial Sequence
  Description of Artificial Sequence: Synthetic oligonucleotide
atgctcggccagagcagaga

SEQ ID NO: 6322 - DNA, 20 bp, Artificial Sequence
  Description of Artificial Sequence: Synthetic oligonucleotide
tgctcggccagagcagagac

SEQ ID NO: 6323 - DNA, 20 bp, Artificial Sequence
  Description of Artificial Sequence: Synthetic oligonucleotide
gctcggccagagcagagact

SEQ ID NO: 6324 - DNA, 20 bp, Artificial Sequence
  Description of Artificial Sequence: Synthetic oligonucleotide
ctcggccagagcagagacta

SEQ ID NO: 6325 - DNA, 20 bp, Artificial Sequence
  Description of Artificial Sequence: Synthetic oligonucleotide
tcggccagagcagagactag

SEQ ID NO: 6326 - DNA, 20 bp, Artificial Sequence
  Description of Artificial Sequence: Synthetic oligonucleotide
cggccagagcagagactagt

SEQ ID NO: 6327 - DNA, 20 bp, Artificial Sequence
  Description of Artificial Sequence: Synthetic oligonucleotide
ggccagagcagagactagtg

SEQ ID NO: 6328 - DNA, 20 bp, Artificial Sequence
  Description of Artificial Sequence: Synthetic oligonucleotide
gccagagcagagactagtgt

SEQ ID NO: 6329 - DNA, 20 bp, Artificial Sequence
  Description of Artificial Sequence: Synthetic oligonucleotide
ccagagcagagactagtgtt

SEQ ID NO: 6330 - DNA, 20 bp, Artificial Sequence
  Description of Artificial Sequence: Synthetic oligonucleotide
cagagcagagactagtgttc

SEQ ID NO: 6331 - DNA, 20 bp, Artificial Sequence
  Description of Artificial Sequence: Synthetic oligonucleotide
agagcagagactagtgttcg

SEQ ID NO: 6332 - DNA, 20 bp, Artificial Sequence
  Description of Artificial Sequence: Synthetic oligonucleotide
gagcagagactagtgttcgg

SEQ ID NO: 6333 - DNA, 20 bp, Artificial Sequence
  Description of Artificial Sequence: Synthetic oligonucleotide
agcagagactagtgttcggc

SEQ ID NO: 6334 - DNA, 20 bp, Artificial Sequence
  Description of Artificial Sequence: Synthetic oligonucleotide
gcagagactagtgttcggca

SEQ ID NO: 6335 - DNA, 20 bp, Artificial Sequence
  Description of Artificial Sequence: Synthetic oligonucleotide
cagagactagtgttcggcac

SEQ ID NO: 6336 - DNA, 20 bp, Artificial Sequence
  Description of Artificial Sequence: Synthetic oligonucleotide
agagactagtgttcggcaca

SEQ ID NO: 6337 - DNA, 20 bp, Artificial Sequence
  Description of Artificial Sequence: Synthetic oligonucleotide
gagactagtgttcggcacag

SEQ ID NO: 6338 - DNA, 20 bp, Artificial Sequence
  Description of Artificial Sequence: Synthetic oligonucleotide
agactagtgttcggcacagc

SEQ ID NO: 6339 - DNA, 20 bp, Artificial Sequence
  Description of Artificial Sequence: Synthetic oligonucleotide
gactagtgttcggcacagct

SEQ ID NO: 6340 - DNA, 20 bp, Artificial Sequence
  Description of Artificial Sequence: Synthetic oligonucleotide
actagtgttcggcacagctg

SEQ ID NO: 6341 - DNA, 20 bp, Artificial Sequence
  Description of Artificial Sequence: Synthetic oligonucleotide
ctagtgttcggcacagctga

SEQ ID NO: 6342 - DNA, 20 bp, Artificial Sequence
  Description of Artificial Sequence: Synthetic oligonucleotide
tagtgttcggcacagctgac

SEQ ID NO: 6343 - DNA, 20 bp, Artificial Sequence
  Description of Artificial Sequence: Synthetic oligonucleotide
agtgttcggcacagctgact

SEQ ID NO: 6344 - DNA, 20 bp, Artificial Sequence
  Description of Artificial Sequence: Synthetic oligonucleotide
gtgttcggcacagctgactg

SEQ ID NO: 6345 - DNA, 20 bp, Artificial Sequence
  Description of Artificial Sequence: Synthetic oligonucleotide
tgttcggcacagctgactgt

SEQ ID NO: 6346 - DNA, 20 bp, Artificial Sequence
  Description of Artificial Sequence: Synthetic oligonucleotide
gttcggcacagctgactgtt

SEQ ID NO: 6347 - DNA, 20 bp, Artificial Sequence
  Description of Artificial Sequence: Synthetic oligonucleotide
ttcggcacagctgactgttg

SEQ ID NO: 6348 - DNA, 20 bp, Artificial Sequence
  Description of Artificial Sequence: Synthetic oligonucleotide
tcggcacagctgactgttga

SEQ ID NO: 6349 - DNA, 20 bp, Artificial Sequence
  Description of Artificial Sequence: Synthetic oligonucleotide
cggcacagctgactgttgaa

SEQ ID NO: 6350 - DNA, 20 bp, Artificial Sequence
  Description of Artificial Sequence: Synthetic oligonucleotide
ggcacagctgactgttgaat

SEQ ID NO: 6351 - DNA, 20 bp, Artificial Sequence
  Description of Artificial Sequence: Synthetic oligonucleotide
gcacagctgactgttgaatt

SEQ ID NO: 6352 - DNA, 20 bp, Artificial Sequence
  Description of Artificial Sequence: Synthetic oligonucleotide
cacagctgactgttgaattt

SEQ ID NO: 6353 - DNA, 20 bp, Artificial Sequence
  Description of Artificial Sequence: Synthetic oligonucleotide
acagctgactgttgaatttg

SEQ ID NO: 6354 - DNA, 20 bp, Artificial Sequence
  Description of Artificial Sequence: Synthetic oligonucleotide
cagctgactgttgaatttgc

SEQ ID NO: 6355 - DNA, 20 bp, Artificial Sequence
  Description of Artificial Sequence: Synthetic oligonucleotide
agctgactgttgaatttgct

SEQ ID NO: 6356 - DNA, 20 bp, Artificial Sequence
  Description of Artificial Sequence: Synthetic oligonucleotide
gctgactgttgaatttgctc

SEQ ID NO: 6357 - DNA, 20 bp, Artificial Sequence
  Description of Artificial Sequence: Synthetic oligonucleotide
ctgactgttgaatttgctct

SEQ ID NO: 6358 - DNA, 20 bp, Artificial Sequence
  Description of Artificial Sequence: Synthetic oligonucleotide
tgactgttgaatttgctcta

SEQ ID NO: 6359 - DNA, 20 bp, Artificial Sequence
  Description of Artificial Sequence: Synthetic oligonucleotide
gactgttgaatttgctctac

SEQ ID NO: 6360 - DNA, 20 bp, Artificial Sequence
  Description of Artificial Sequence: Synthetic oligonucleotide
actgttgaatttgctctact

SEQ ID NO: 6361 - DNA, 20 bp, Artificial Sequence
  Description of Artificial Sequence: Synthetic oligonucleotide
ctgttgaatttgctctactc

SEQ ID NO: 6362 - DNA, 20 bp, Artificial Sequence
  Description of Artificial Sequence: Synthetic oligonucleotide
tgttgaatttgctctactct

SEQ ID NO: 6363 - DNA, 20 bp, Artificial Sequence
  Description of Artificial Sequence: Synthetic oligonucleotide
gttgaatttgctctactctg

SEQ ID NO: 6364 - DNA, 20 bp, Artificial Sequence
  Description of Artificial Sequence: Synthetic oligonucleotide
ttgaatttgctctactctgg

SEQ ID NO: 6365 - DNA, 20 bp, Artificial Sequence
  Description of Artificial Sequence: Synthetic oligonucleotide
tgaatttgctctactctggc

SEQ ID NO: 6366 - DNA, 20 bp, Artificial Sequence
  Description of Artificial Sequence: Synthetic oligonucleotide
gaatttgctctactctggcc

SEQ ID NO: 6367 - DNA, 20 bp, Artificial Sequence
  Description of Artificial Sequence: Synthetic oligonucleotide
aatttgctctactctggcct

SEQ ID NO: 6368 - DNA, 20 bp, Artificial Sequence
  Description of Artificial Sequence: Synthetic oligonucleotide
atttgctctactctggcctg

SEQ ID NO: 6369 - DNA, 20 bp, Artificial Sequence
  Description of Artificial Sequence: Synthetic oligonucleotide
tttgctctactctggcctgg

SEQ ID NO: 6370 - DNA, 20 bp, Artificial Sequence
  Description of Artificial Sequence: Synthetic oligonucleotide
ttgctctactctggcctggg

SEQ ID NO: 6371 - DNA, 20 bp, Artificial Sequence
  Description of Artificial Sequence: Synthetic oligonucleotide
tgctctactctggcctgggt

SEQ ID NO: 6372 - DNA, 20 bp, Artificial Sequence
  Description of Artificial Sequence: Synthetic oligonucleotide
gctctactctggcctgggtc

SEQ ID NO: 6373 - DNA, 20 bp, Artificial Sequence
  Description of Artificial Sequence: Synthetic oligonucleotide
ctctactctggcctgggtct

SEQ ID NO: 6374 - DNA, 20 bp, Artificial Sequence
  Description of Artificial Sequence: Synthetic oligonucleotide
tctactctggcctgggtctg

SEQ ID NO: 6375 - DNA, 20 bp, Artificial Sequence
  Description of Artificial Sequence: Synthetic oligonucleotide
ctactctggcctgggtctgg

SEQ ID NO: 6376 - DNA, 20 bp, Artificial Sequence
  Description of Artificial Sequence: Synthetic oligonucleotide
tactctggcctgggtctggc

SEQ ID NO: 6377 - DNA, 20 bp, Artificial Sequence
  Description of Artificial Sequence: Synthetic oligonucleotide
actctggcctgggtctggcc

SEQ ID NO: 6378 - DNA, 20 bp, Artificial Sequence
  Description of Artificial Sequence: Synthetic oligonucleotide
ctctggcctgggtctggcct

SEQ ID NO: 6379 - DNA, 20 bp, Artificial Sequence
  Description of Artificial Sequence: Synthetic oligonucleotide
tctggcctgggtctggcctc

SEQ ID NO: 6380 - DNA, 20 bp, Artificial Sequence
  Description of Artificial Sequence: Synthetic oligonucleotide
ctggcctgggtctggcctct

SEQ ID NO: 6381 - DNA, 20 bp, Artificial Sequence
  Description of Artificial Sequence: Synthetic oligonucleotide
tggcctgggtctggcctctt

SEQ ID NO: 6382 - DNA, 20 bp, Artificial Sequence
  Description of Artificial Sequence: Synthetic oligonucleotide
ggcctgggtctggcctcttc

SEQ ID NO: 6383 - DNA, 20 bp, Artificial Sequence
  Description of Artificial Sequence: Synthetic oligonucleotide
gcctgggtctggcctcttcc

SEQ ID NO: 6384 - DNA, 20 bp, Artificial Sequence
  Description of Artificial Sequence: Synthetic oligonucleotide
cctgggtctggcctcttcct

SEQ ID NO: 6385 - DNA, 20 bp, Artificial Sequence
  Description of Artificial Sequence: Synthetic oligonucleotide
ctgggtctggcctcttcctg

SEQ ID NO: 6386 - DNA, 20 bp, Artificial Sequence
  Description of Artificial Sequence: Synthetic oligonucleotide
tgggtctggcctcttcctgt

SEQ ID NO: 6387 - DNA, 20 bp, Artificial Sequence
  Description of Artificial Sequence: Synthetic oligonucleotide
gggtctggcctcttcctgtc

SEQ ID NO: 6388 - DNA, 20 bp, Artificial Sequence
  Description of Artificial Sequence: Synthetic oligonucleotide
ggtctggcctcttcctgtcc

SEQ ID NO: 6389 - DNA, 20 bp, Artificial Sequence
  Description of Artificial Sequence: Synthetic oligonucleotide
gtctggcctcttcctgtccc

SEQ ID NO: 6390 - DNA, 20 bp, Artificial Sequence
  Description of Artificial Sequence: Synthetic oligonucleotide
tctggcctcttcctgtccca

SEQ ID NO: 6391 - DNA, 20 bp, Artificial Sequence
  Description of Artificial Sequence: Synthetic oligonucleotide
ctggcctcttcctgtcccac

SEQ ID NO: 6392 - DNA, 20 bp, Artificial Sequence
  Description of Artificial Sequence: Synthetic oligonucleotide
tggcctcttcctgtcccacc

SEQ ID NO: 6393 - DNA, 20 bp, Artificial Sequence
  Description of Artificial Sequence: Synthetic oligonucleotide
ggcctcttcctgtcccacct

SEQ ID NO: 6394 - DNA, 20 bp, Artificial Sequence
  Description of Artificial Sequence: Synthetic oligonucleotide
gcctcttcctgtcccacctg

SEQ ID NO: 6395 - DNA, 20 bp, Artificial Sequence
  Description of Artificial Sequence: Synthetic oligonucleotide
cctcttcctgtcccacctgc

SEQ ID NO: 6396 - DNA, 20 bp, Artificial Sequence
  Description of Artificial Sequence: Synthetic oligonucleotide
ctcttcctgtcccacctgca

SEQ ID NO: 6397 - DNA, 20 bp, Artificial Sequence
  Description of Artificial Sequence: Synthetic oligonucleotide
tcttcctgtcccacctgcag

SEQ ID NO: 6398 - DNA, 20 bp, Artificial Sequence
  Description of Artificial Sequence: Synthetic oligonucleotide
cttcctgtcccacctgcagc

SEQ ID NO: 6399 - DNA, 20 bp, Artificial Sequence
  Description of Artificial Sequence: Synthetic oligonucleotide
ttcctgtcccacctgcagcc

SEQ ID NO: 6400 - DNA, 20 bp, Artificial Sequence
  Description of Artificial Sequence: Synthetic oligonucleotide
tcctgtcccacctgcagccc

SEQ ID NO: 6401 - DNA, 20 bp, Artificial Sequence
  Description of Artificial Sequence: Synthetic oligonucleotide
cctgtcccacctgcagcccc

SEQ ID NO: 6402 - DNA, 20 bp, Artificial Sequence
  Description of Artificial Sequence: Synthetic oligonucleotide
ctgtcccacctgcagcccca

SEQ ID NO: 6403 - DNA, 20 bp, Artificial Sequence
  Description of Artificial Sequence: Synthetic oligonucleotide
tgtcccacctgcagccccac

SEQ ID NO: 6404 - DNA, 20 bp, Artificial Sequence
  Description of Artificial Sequence: Synthetic oligonucleotide
gtcccacctgcagccccact

SEQ ID NO: 6405 - DNA, 20 bp, Artificial Sequence
  Description of Artificial Sequence: Synthetic oligonucleotide
tcccacctgcagccccactt

SEQ ID NO: 6406 - DNA, 20 bp, Artificial Sequence
  Description of Artificial Sequence: Synthetic oligonucleotide
cccacctgcagccccacttt

SEQ ID NO: 6407 - DNA, 20 bp, Artificial Sequence
  Description of Artificial Sequence: Synthetic oligonucleotide
ccacctgcagccccactttt

SEQ ID NO: 6408 - DNA, 20 bp, Artificial Sequence
  Description of Artificial Sequence: Synthetic oligonucleotide
cacctgcagccccacttttg

SEQ ID NO: 6409 - DNA, 20 bp, Artificial Sequence
  Description of Artificial Sequence: Synthetic oligonucleotide
acctgcagccccacttttgt

SEQ ID NO: 6410 - DNA, 20 bp, Artificial Sequence
  Description of Artificial Sequence: Synthetic oligonucleotide
cctgcagccccacttttgtc

SEQ ID NO: 6411 - DNA, 20 bp, Artificial Sequence
  Description of Artificial Sequence: Synthetic oligonucleotide
ctgcagccccacttttgtcg

SEQ ID NO: 6412 - DNA, 20 bp, Artificial Sequence
  Description of Artificial Sequence: Synthetic oligonucleotide
tgcagccccacttttgtcgg

SEQ ID NO: 6413 - DNA, 20 bp, Artificial Sequence
  Description of Artificial Sequence: Synthetic oligonucleotide
gcagccccacttttgtcggg

SEQ ID NO: 6414 - DNA, 20 bp, Artificial Sequence
  Description of Artificial Sequence: Synthetic oligonucleotide
cagccccacttttgtcgggg

SEQ ID NO: 6415 - DNA, 20 bp, Artificial Sequence
  Description of Artificial Sequence: Synthetic oligonucleotide
agccccacttttgtcggggg

SEQ ID NO: 6416 - DNA, 20 bp, Artificial Sequence
  Description of Artificial Sequence: Synthetic oligonucleotide
gccccacttttgtcgggggg

SEQ ID NO: 6417 - DNA, 20 bp, Artificial Sequence
  Description of Artificial Sequence: Synthetic oligonucleotide
ccccacttttgtcggggggt

SEQ ID NO: 6418 - DNA, 20 bp, Artificial Sequence
  Description of Artificial Sequence: Synthetic oligonucleotide
cccacttttgtcggggggtt

SEQ ID NO: 6419 - DNA, 20 bp, Artificial Sequence
  Description of Artificial Sequence: Synthetic oligonucleotide
ccacttttgtcggggggttg

SEQ ID NO: 6420 - DNA, 20 bp, Artificial Sequence
  Description of Artificial Sequence: Synthetic oligonucleotide
cacttttgtcggggggttgg

SEQ ID NO: 6421 - DNA, 20 bp, Artificial Sequence
  Description of Artificial Sequence: Synthetic oligonucleotide
acttttgtcggggggttggg

SEQ ID NO: 6422 - DNA, 20 bp, Artificial Sequence
  Description of Artificial Sequence: Synthetic oligonucleotide
cttttgtcggggggttgggg

SEQ ID NO: 6423 - DNA, 20 bp, Artificial Sequence
  Description of Artificial Sequence: Synthetic oligonucleotide
ttttgtcggggggttggggg

SEQ ID NO: 6424 - DNA, 20 bp, Artificial Sequence
  Description of Artificial Sequence: Synthetic oligonucleotide
tttgtcggggggttgggggg

SEQ ID NO: 6425 - DNA, 20 bp, Artificial Sequence
  Description of Artificial Sequence: Synthetic oligonucleotide
ttgtcggggggttggggggg

SEQ ID NO: 6426 - DNA, 20 bp, Artificial Sequence
  Description of Artificial Sequence: Synthetic oligonucleotide
tgtcggggggttgggggggt

SEQ ID NO: 6427 - DNA, 20 bp, Artificial Sequence
  Description of Artificial Sequence: Synthetic oligonucleotide
gtcggggggttgggggggtt

SEQ ID NO: 6428 - DNA, 20 bp, Artificial Sequence
  Description of Artificial Sequence: Synthetic oligonucleotide
tcggggggttgggggggttg

SEQ ID NO: 6429 - DNA, 20 bp, Artificial Sequence
  Description of Artificial Sequence: Synthetic oligonucleotide
cggggggttgggggggttgc

SEQ ID NO: 6430 - DNA, 20 bp, Artificial Sequence
  Description of Artificial Sequence: Synthetic oligonucleotide
ggggggttgggggggttgca

SEQ ID NO: 6431 - DNA, 20 bp, Artificial Sequence
  Description of Artificial Sequence: Synthetic oligonucleotide
gggggttgggggggttgcag

SEQ ID NO: 6432 - DNA, 20 bp, Artificial Sequence
  Description of Artificial Sequence: Synthetic oligonucleotide
ggggttgggggggttgcaga

SEQ ID NO: 6433 - DNA, 20 bp, Artificial Sequence
  Description of Artificial Sequence: Synthetic oligonucleotide
gggttgggggggttgcagaa

SEQ ID NO: 6434 - DNA, 20 bp, Artificial Sequence
  Description of Artificial Sequence: Synthetic oligonucleotide
ggttgggggggttgcagaaa

SEQ ID NO: 6435 - DNA, 20 bp, Artificial Sequence
  Description of Artificial Sequence: Synthetic oligonucleotide
gttgggggggttgcagaaag

SEQ ID NO: 6436 - DNA, 20 bp, Artificial Sequence
  Description of Artificial Sequence: Synthetic oligonucleotide
ttgggggggttgcagaaagg

SEQ ID NO: 6437 - DNA, 20 bp, Artificial Sequence
  Description of Artificial Sequence: Synthetic oligonucleotide
tgggggggttgcagaaagga

SEQ ID NO: 6438 - DNA, 20 bp, Artificial Sequence
  Description of Artificial Sequence: Synthetic oligonucleotide
gggggggttgcagaaaggaa

SEQ ID NO: 6439 - DNA, 20 bp, Artificial Sequence
  Description of Artificial Sequence: Synthetic oligonucleotide
ggggggttgcagaaaggaaa

SEQ ID NO: 6440 - DNA, 20 bp, Artificial Sequence
  Description of Artificial Sequence: Synthetic oligonucleotide
gggggttgcagaaaggaaaa

SEQ ID NO: 6441 - DNA, 20 bp, Artificial Sequence
  Description of Artificial Sequence: Synthetic oligonucleotide
ggggttgcagaaaggaaaaa

SEQ ID NO: 6442 - DNA, 20 bp, Artificial Sequence
  Description of Artificial Sequence: Synthetic oligonucleotide
gggttgcagaaaggaaaaat

SEQ ID NO: 6443 - DNA, 20 bp, Artificial Sequence
  Description of Artificial Sequence: Synthetic oligonucleotide
ggttgcagaaaggaaaaata

SEQ ID NO: 6444 - DNA, 20 bp, Artificial Sequence
  Description of Artificial Sequence: Synthetic oligonucleotide
gttgcagaaaggaaaaatac

SEQ ID NO: 6445 - DNA, 20 bp, Artificial Sequence
  Description of Artificial Sequence: Synthetic oligonucleotide
ttgcagaaaggaaaaatacc

SEQ ID NO: 6446 - DNA, 20 bp, Artificial Sequence
  Description of Artificial Sequence: Synthetic oligonucleotide
tgcagaaaggaaaaatacct

SEQ ID NO: 6447 - DNA, 20 bp, Artificial Sequence
  Description of Artificial Sequence: Synthetic oligonucleotide
gcagaaaggaaaaataccta

SEQ ID NO: 6448 - DNA, 20 bp, Artificial Sequence
  Description of Artificial Sequence: Synthetic oligonucleotide
cagaaaggaaaaatacctat

SEQ ID NO: 6449 - DNA, 20 bp, Artificial Sequence
  Description of Artificial Sequence: Synthetic oligonucleotide
agaaaggaaaaatacctatt

SEQ ID NO: 6450 - DNA, 20 bp, Artificial Sequence
  Description of Artificial Sequence: Synthetic oligonucleotide
gaaaggaaaaatacctattt

SEQ ID NO: 6451 - DNA, 20 bp, Artificial Sequence
  Description of Artificial Sequence: Synthetic oligonucleotide
aaaggaaaaatacctatttt

SEQ ID NO: 6452 - DNA, 20 bp, Artificial Sequence
  Description of Artificial Sequence: Synthetic oligonucleotide
aaggaaaaatacctattttt

SEQ ID NO: 6453 - DNA, 20 bp, Artificial Sequence
  Description of Artificial Sequence: Synthetic oligonucleotide
aggaaaaatacctatttttc

SEQ ID NO: 6454 - DNA, 20 bp, Artificial Sequence
  Description of Artificial Sequence: Synthetic oligonucleotide
ggaaaaatacctatttttcc

SEQ ID NO: 6455 - DNA, 20 bp, Artificial Sequence
  Description of Artificial Sequence: Synthetic oligonucleotide
gaaaaatacctatttttcct

SEQ ID NO: 6456 - DNA, 20 bp, Artificial Sequence
  Description of Artificial Sequence: Synthetic oligonucleotide
aaaaatacctatttttcctc

SEQ ID NO: 6457 - DNA, 20 bp, Artificial Sequence
  Description of Artificial Sequence: Synthetic oligonucleotide
aaaatacctatttttcctca

SEQ ID NO: 6458 - DNA, 20 bp, Artificial Sequence
  Description of Artificial Sequence: Synthetic oligonucleotide
aaatacctatttttcctcaa

SEQ ID NO: 6459 - DNA, 20 bp, Artificial Sequence
  Description of Artificial Sequence: Synthetic oligonucleotide
aatacctatttttcctcaac

SEQ ID NO: 6460 - DNA, 20 bp, Artificial Sequence
  Description of Artificial Sequence: Synthetic oligonucleotide
atacctatttttcctcaact

SEQ ID NO: 6461 - DNA, 20 bp, Artificial Sequence
  Description of Artificial Sequence: Synthetic oligonucleotide
tacctatttttcctcaactc

SEQ ID NO: 6462 - DNA, 20 bp, Artificial Sequence
  Description of Artificial Sequence: Synthetic oligonucleotide
acctatttttcctcaactcc

SEQ ID NO: 6463 - DNA, 20 bp, Artificial Sequence
  Description of Artificial Sequence: Synthetic oligonucleotide
cctatttttcctcaactcca

SEQ ID NO: 6464 - DNA, 20 bp, Artificial Sequence
  Description of Artificial Sequence: Synthetic oligonucleotide
ctatttttcctcaactccat

SEQ ID NO: 6465 - DNA, 20 bp, Artificial Sequence
  Description of Artificial Sequence: Synthetic oligonucleotide
tatttttcctcaactccatt

SEQ ID NO: 6466 - DNA, 20 bp, Artificial Sequence
  Description of Artificial Sequence: Synthetic oligonucleotide
atttttcctcaactccatta

SEQ ID NO: 6467 - DNA, 20 bp, Artificial Sequence
  Description of Artificial Sequence: Synthetic oligonucleotide
tttttcctcaactccattac

SEQ ID NO: 6468 - DNA, 20 bp, Artificial Sequence
  Description of Artificial Sequence: Synthetic oligonucleotide
ttttcctcaactccattaca

SEQ ID NO: 6469 - DNA, 20 bp, Artificial Sequence
  Description of Artificial Sequence: Synthetic oligonucleotide
tttcctcaactccattacaa

SEQ ID NO: 6470 - DNA, 20 bp, Artificial Sequence
  Description of Artificial Sequence: Synthetic oligonucleotide
ttcctcaactccattacaac

SEQ ID NO: 6471 - DNA, 20 bp, Artificial Sequence
  Description of Artificial Sequence: Synthetic oligonucleotide
tcctcaactccattacaact

SEQ ID NO: 6472 - DNA, 20 bp, Artificial Sequence
  Description of Artificial Sequence: Synthetic oligonucleotide
cctcaactccattacaactt

SEQ ID NO: 6473 - DNA, 20 bp, Artificial Sequence
  Description of Artificial Sequence: Synthetic oligonucleotide
ctcaactccattacaacttg

SEQ ID NO: 6474 - DNA, 20 bp, Artificial Sequence
  Description of Artificial Sequence: Synthetic oligonucleotide
tcaactccattacaacttgc

SEQ ID NO: 6475 - DNA, 20 bp, Artificial Sequence
  Description of Artificial Sequence: Synthetic oligonucleotide
caactccattacaacttgca

SEQ ID NO: 6476 - DNA, 20 bp, Artificial Sequence
  Description of Artificial Sequence: Synthetic oligonucleotide
aactccattacaacttgcag

SEQ ID NO: 6477 - DNA, 20 bp, Artificial Sequence
  Description of Artificial Sequence: Synthetic oligonucleotide
actccattacaacttgcagg

SEQ ID NO: 6478 - DNA, 20 bp, Artificial Sequence
  Description of Artificial Sequence: Synthetic oligonucleotide
ctccattacaacttgcagga

SEQ ID NO: 6479 - DNA, 20 bp, Artificial Sequence
  Description of Artificial Sequence: Synthetic oligonucleotide
tccattacaacttgcaggaa

SEQ ID NO: 6480 - DNA, 20 bp, Artificial Sequence
  Description of Artificial Sequence: Synthetic oligonucleotide
ccattacaacttgcaggaaa

SEQ ID NO: 6481 - DNA, 20 bp, Artificial Sequence
  Description of Artificial Sequence: Synthetic oligonucleotide
cattacaacttgcaggaaaa

SEQ ID NO: 6482 - DNA, 20 bp, Artificial Sequence
  Description of Artificial Sequence: Synthetic oligonucleotide
attacaacttgcaggaaaac

SEQ ID NO: 6483 - DNA, 20 bp, Artificial Sequence
  Description of Artificial Sequence: Synthetic oligonucleotide
ttacaacttgcaggaaaacc

SEQ ID NO: 6484 - DNA, 20 bp, Artificial Sequence
  Description of Artificial Sequence: Synthetic oligonucleotide
tacaacttgcaggaaaacca

SEQ ID NO: 6485 - DNA, 20 bp, Artificial Sequence
  Description of Artificial Sequence: Synthetic oligonucleotide
acaacttgcaggaaaaccat

SEQ ID NO: 6486 - DNA, 20 bp, Artificial Sequence
  Description of Artificial Sequence: Synthetic oligonucleotide
caacttgcaggaaaaccatc

SEQ ID NO: 6487 - DNA, 20 bp, Artificial Sequence
  Description of Artificial Sequence: Synthetic oligonucleotide
aacttgcaggaaaaccatca

SEQ ID NO: 6488 - DNA, 20 bp, Artificial Sequence
  Description of Artificial Sequence: Synthetic oligonucleotide
acttgcaggaaaaccatcac

SEQ ID NO: 6489 - DNA, 20 bp, Artificial Sequence
  Description of Artificial Sequence: Synthetic oligonucleotide
cttgcaggaaaaccatcaca

SEQ ID NO: 6490 - DNA, 20 bp, Artificial Sequence
  Description of Artificial Sequence: Synthetic oligonucleotide
ttgcaggaaaaccatcacaa

SEQ ID NO: 6491 - DNA, 20 bp, Artificial Sequence
  Description of Artificial Sequence: Synthetic oligonucleotide
tgcaggaaaaccatcacaat

SEQ ID NO: 6492 - DNA, 20 bp, Artificial Sequence
  Description of Artificial Sequence: Synthetic oligonucleotide
gcaggaaaaccatcacaatg

SEQ ID NO: 6493 - DNA, 20 bp, Artificial Sequence
  Description of Artificial Sequence: Synthetic oligonucleotide
caggaaaaccatcacaatga

SEQ ID NO: 6494 - DNA, 20 bp, Artificial Sequence
  Description of Artificial Sequence: Synthetic oligonucleotide
aggaaaaccatcacaatgaa

SEQ ID NO: 6495 - DNA, 20 bp, Artificial Sequence
  Description of Artificial Sequence: Synthetic oligonucleotide
ggaaaaccatcacaatgaat

SEQ ID NO: 6496 - DNA, 20 bp, Artificial Sequence
  Description of Artificial Sequence: Synthetic oligonucleotide
gaaaaccatcacaatgaata

SEQ ID NO: 6497 - DNA, 20 bp, Artificial Sequence
  Description of Artificial Sequence: Synthetic oligonucleotide
aaaaccatcacaatgaatat

SEQ ID NO: 6498 - DNA, 20 bp, Artificial Sequence
  Description of Artificial Sequence: Synthetic oligonucleotide
aaaccatcacaatgaatata

SEQ ID NO: 6499 - DNA, 20 bp, Artificial Sequence
  Description of Artificial Sequence: Synthetic oligonucleotide
aaccatcacaatgaatatac

SEQ ID NO: 6500 - DNA, 20 bp, Artificial Sequence
  Description of Artificial Sequence: Synthetic oligonucleotide
accatcacaatgaatataca

SEQ ID NO: 6501 - DNA, 20 bp, Artificial Sequence
  Description of Artificial Sequence: Synthetic oligonucleotide
ccatcacaatgaatatacag

SEQ ID NO: 6502 - DNA, 20 bp, Artificial Sequence
  Description of Artificial Sequence: Synthetic oligonucleotide
catcacaatgaatatacaga

SEQ ID NO: 6503 - DNA, 20 bp, Artificial Sequence
  Description of Artificial Sequence: Synthetic oligonucleotide
atcacaatgaatatacagat

SEQ ID NO: 6504 - DNA, 20 bp, Artificial Sequence
  Description of Artificial Sequence: Synthetic oligonucleotide
tcacaatgaatatacagatt

SEQ ID NO: 6505 - DNA, 20 bp, Artificial Sequence
  Description of Artificial Sequence: Synthetic oligonucleotide
cacaatgaatatacagattt

SEQ ID NO: 6506 - DNA, 20 bp, Artificial Sequence
  Description of Artificial Sequence: Synthetic oligonucleotide
acaatgaatatacagatttg

SEQ ID NO: 6507 - DNA, 20 bp, Artificial Sequence
  Description of Artificial Sequence: Synthetic oligonucleotide
caatgaatatacagatttgt

SEQ ID NO: 6508 - DNA, 20 bp, Artificial Sequence
  Description of Artificial Sequence: Synthetic oligonucleotide
aatgaatatacagatttgtc

SEQ ID NO: 6509 - DNA, 20 bp, Artificial Sequence
  Description of Artificial Sequence: Synthetic oligonucleotide
atgaatatacagatttgtct

SEQ ID NO: 6510 - DNA, 20 bp, Artificial Sequence
  Description of Artificial Sequence: Synthetic oligonucleotide
tgaatatacagatttgtctt

SEQ ID NO: 6511 - DNA, 20 bp, Artificial Sequence
  Description of Artificial Sequence: Synthetic oligonucleotide
gaatatacagatttgtcttg

SEQ ID NO: 6512 - DNA, 20 bp, Artificial Sequence
  Description of Artificial Sequence: Synthetic oligonucleotide
aatatacagatttgtcttga

SEQ ID NO: 6513 - DNA, 20 bp, Artificial Sequence
  Description of Artificial Sequence: Synthetic oligonucleotide
atatacagatttgtcttgaa

SEQ ID NO: 6514 - DNA, 20 bp, Artificial Sequence
  Description of Artificial Sequence: Synthetic oligonucleotide
tatacagatttgtcttgaat

SEQ ID NO: 6515 - DNA, 20 bp, Artificial Sequence
  Description of Artificial Sequence: Synthetic oligonucleotide
atacagatttgtcttgaatc

SEQ ID NO: 6516 - DNA, 20 bp, Artificial Sequence
  Description of Artificial Sequence: Synthetic oligonucleotide
tacagatttgtcttgaatca

SEQ ID NO: 6517 - DNA, 20 bp, Artificial Sequence
  Description of Artificial Sequence: Synthetic oligonucleotide
acagatttgtcttgaatcag

SEQ ID NO: 6518 - DNA, 20 bp, Artificial Sequence
  Description of Artificial Sequence: Synthetic oligonucleotide
cagatttgtcttgaatcaga

SEQ ID NO: 6519 - DNA, 20 bp, Artificial Sequence
  Description of Artificial Sequence: Synthetic oligonucleotide
agatttgtcttgaatcagaa

SEQ ID NO: 6520 - DNA, 20 bp, Artificial Sequence
  Description of Artificial Sequence: Synthetic oligonucleotide
gatttgtcttgaatcagaat

SEQ ID NO: 6521 - DNA, 20 bp, Artificial Sequence
  Description of Artificial Sequence: Synthetic oligonucleotide
atttgtcttgaatcagaata

SEQ ID NO: 6522 - DNA, 20 bp, Artificial Sequence
  Description of Artificial Sequence: Synthetic oligonucleotide
tttgtcttgaatcagaatag

SEQ ID NO: 6523 - DNA, 20 bp, Artificial Sequence
  Description of Artificial Sequence: Synthetic oligonucleotide
ttgtcttgaatcagaatagg

SEQ ID NO: 6524 - DNA, 20 bp, Artificial Sequence
  Description of Artificial Sequence: Synthetic oligonucleotide
tgtcttgaatcagaatagga

SEQ ID NO: 6525 - DNA, 20 bp, Artificial Sequence
  Description of Artificial Sequence: Synthetic oligonucleotide
gtcttgaatcagaataggaa

SEQ ID NO: 6526 - DNA, 20 bp, Artificial Sequence
  Description of Artificial Sequence: Synthetic oligonucleotide
tcttgaatcagaataggaat

SEQ ID NO: 6527 - DNA, 20 bp, Artificial Sequence
  Description of Artificial Sequence: Synthetic oligonucleotide
cttgaatcagaataggaatg

SEQ ID NO: 6528 - DNA, 20 bp, Artificial Sequence
  Description of Artificial Sequence: Synthetic oligonucleotide
ttgaatcagaataggaatgg

SEQ ID NO: 6529 - DNA, 20 bp, Artificial Sequence
  Description of Artificial Sequence: Synthetic oligonucleotide
tgaatcagaataggaatggc

SEQ ID NO: 6530 - DNA, 20 bp, Artificial Sequence
  Description of Artificial Sequence: Synthetic oligonucleotide
gaatcagaataggaatggca

SEQ ID NO: 6531 - DNA, 20 bp, Artificial Sequence
  Description of Artificial Sequence: Synthetic oligonucleotide
aatcagaataggaatggcac

SEQ ID NO: 6532 - DNA, 20 bp, Artificial Sequence
  Description of Artificial Sequence: Synthetic oligonucleotide
atcagaataggaatggcacc

SEQ ID NO: 6533 - DNA, 20 bp, Artificial Sequence
  Description of Artificial Sequence: Synthetic oligonucleotide
tcagaataggaatggcaccc

SEQ ID NO: 6534 - DNA, 20 bp, Artificial Sequence
  Description of Artificial Sequence: Synthetic oligonucleotide
cagaataggaatggcacccc

SEQ ID NO: 6535 - DNA, 20 bp, Artificial Sequence
  Description of Artificial Sequence: Synthetic oligonucleotide
agaataggaatggcaccccc

SEQ ID NO: 6536 - DNA, 20 bp, Artificial Sequence
  Description of Artificial Sequence: Synthetic oligonucleotide
gaataggaatggcacccccg

SEQ ID NO: 6537 - DNA, 20 bp, Artificial Sequence
  Description of Artificial Sequence: Synthetic oligonucleotide
aataggaatggcacccccgg

SEQ ID NO: 6538 - DNA, 20 bp, Artificial Sequence
  Description of Artificial Sequence: Synthetic oligonucleotide
ataggaatggcacccccgga

SEQ ID NO: 6539 - DNA, 20 bp, Artificial Sequence
  Description of Artificial Sequence: Synthetic oligonucleotide
taggaatggcacccccggag

SEQ ID NO: 6540 - DNA, 20 bp, Artificial Sequence
  Description of Artificial Sequence: Synthetic oligonucleotide
aggaatggcacccccggagt

SEQ ID NO: 6541 - DNA, 20 bp, Artificial Sequence
  Description of Artificial Sequence: Synthetic oligonucleotide
ggaatggcacccccggagtt

SEQ ID NO: 6542 - DNA, 20 bp, Artificial Sequence
  Description of Artificial Sequence: Synthetic oligonucleotide
gaatggcacccccggagttg

SEQ ID NO: 6543 - DNA, 20 bp, Artificial Sequence
  Description of Artificial Sequence: Synthetic oligonucleotide
aatggcacccccggagttgt

SEQ ID NO: 6544 - DNA, 20 bp, Artificial Sequence
  Description of Artificial Sequence: Synthetic oligonucleotide
atggcacccccggagttgta

SEQ ID NO: 6545 - DNA, 20 bp, Artificial Sequence
  Description of Artificial Sequence: Synthetic oligonucleotide
tggcacccccggagttgtac

SEQ ID NO: 6546 - DNA, 20 bp, Artificial Sequence
  Description of Artificial Sequence: Synthetic oligonucleotide
ggcacccccggagttgtacg

SEQ ID NO: 6547 - DNA, 20 bp, Artificial Sequence
  Description of Artificial Sequence: Synthetic oligonucleotide
gcacccccggagttgtacgc

SEQ ID NO: 6548 - DNA, 20 bp, Artificial Sequence
  Description of Artificial Sequence: Synthetic oligonucleotide
cacccccggagttgtacgcg

SEQ ID NO: 6549 - DNA, 20 bp, Artificial Sequence
  Description of Artificial Sequence: Synthetic oligonucleotide
acccccggagttgtacgcgg

SEQ ID NO: 6550 - DNA, 20 bp, Artificial Sequence
  Description of Artificial Sequence: Synthetic oligonucleotide
cccccggagttgtacgcggt

SEQ ID NO: 6551 - DNA, 20 bp, Artificial Sequence
  Description of Artificial Sequence: Synthetic oligonucleotide
ccccggagttgtacgcggtc

SEQ ID NO: 6552 - DNA, 20 bp, Artificial Sequence
  Description of Artificial Sequence: Synthetic oligonucleotide
cccggagttgtacgcggtca

SEQ ID NO: 6553 - DNA, 20 bp, Artificial Sequence
  Description of Artificial Sequence: Synthetic oligonucleotide
ccggagttgtacgcggtcat

SEQ ID NO: 6554 - DNA, 20 bp, Artificial Sequence
  Description of Artificial Sequence: Synthetic oligonucleotide
cggagttgtacgcggtcatg

SEQ ID NO: 6555 - DNA, 20 bp, Artificial Sequence
  Description of Artificial Sequence: Synthetic oligonucleotide
ggagttgtacgcggtcatgt

SEQ ID NO: 6556 - DNA, 20 bp, Artificial Sequence
  Description of Artificial Sequence: Synthetic oligonucleotide
gagttgtacgcggtcatgtg

SEQ ID NO: 6557 - DNA, 20 bp, Artificial Sequence
  Description of Artificial Sequence: Synthetic oligonucleotide
agttgtacgcggtcatgtgt

SEQ ID NO: 6558 - DNA, 20 bp, Artificial Sequence
  Description of Artificial Sequence: Synthetic oligonucleotide
gttgtacgcggtcatgtgtg

SEQ ID NO: 6559 - DNA, 20 bp, Artificial Sequence
  Description of Artificial Sequence: Synthetic oligonucleotide
ttgtacgcggtcatgtgtgg

SEQ ID NO: 6560 - DNA, 20 bp, Artificial Sequence
  Description of Artificial Sequence: Synthetic oligonucleotide
tgtacgcggtcatgtgtggt

SEQ ID NO: 6561 - DNA, 20 bp, Artificial Sequence
  Description of Artificial Sequence: Synthetic oligonucleotide
gtacgcggtcatgtgtggtg

SEQ ID NO: 6562 - DNA, 20 bp, Artificial Sequence
  Description of Artificial Sequence: Synthetic oligonucleotide
tacgcggtcatgtgtggtgg

SEQ ID NO: 6563 - DNA, 20 bp, Artificial Sequence
  Description of Artificial Sequence: Synthetic oligonucleotide
acgcggtcatgtgtggtggc

SEQ ID NO: 6564 - DNA, 20 bp, Artificial Sequence
  Description of Artificial Sequence: Synthetic oligonucleotide
cgcggtcatgtgtggtggca

SEQ ID NO: 6565 - DNA, 20 bp, Artificial Sequence
  Description of Artificial Sequence: Synthetic oligonucleotide
gcggtcatgtgtggtggcac

SEQ ID NO: 6566 - DNA, 20 bp, Artificial Sequence
  Description of Artificial Sequence: Synthetic oligonucleotide
cggtcatgtgtggtggcact

SEQ ID NO: 6567 - DNA, 20 bp, Artificial Sequence
  Description of Artificial Sequence: Synthetic oligonucleotide
ggtcatgtgtggtggcactg

SEQ ID NO: 6568 - DNA, 20 bp, Artificial Sequence
  Description of Artificial Sequence: Synthetic oligonucleotide
gtcatgtgtggtggcactgg

SEQ ID NO: 6569 - DNA, 20 bp, Artificial Sequence
  Description of Artificial Sequence: Synthetic oligonucleotide
tcatgtgtggtggcactggt

SEQ ID NO: 6570 - DNA, 20 bp, Artificial Sequence
  Description of Artificial Sequence: Synthetic oligonucleotide
catgtgtggtggcactggtc

SEQ ID NO: 6571 - DNA, 20 bp, Artificial Sequence
  Description of Artificial Sequence: Synthetic oligonucleotide
atgtgtggtggcactggtcc

SEQ ID NO: 6572 - DNA, 20 bp, Artificial Sequence
  Description of Artificial Sequence: Synthetic oligonucleotide
tgtgtggtggcactggtcca

SEQ ID NO: 6573 - DNA, 20 bp, Artificial Sequence
  Description of Artificial Sequence: Synthetic oligonucleotide
gtgtggtggcactggtccag

SEQ ID NO: 6574 - DNA, 20 bp, Artificial Sequence
  Description of Artificial Sequence: Synthetic oligonucleotide
tgtggtggcactggtccagt

SEQ ID NO: 6575 - DNA, 20 bp, Artificial Sequence
  Description of Artificial Sequence: Synthetic oligonucleotide
gtggtggcactggtccagtc

SEQ ID NO: 6576 - DNA, 20 bp, Artificial Sequence
  Description of Artificial Sequence: Synthetic oligonucleotide
tggtggcactggtccagtca

SEQ ID NO: 6577 - DNA, 20 bp, Artificial Sequence
  Description of Artificial Sequence: Synthetic oligonucleotide
ggtggcactggtccagtcat

SEQ ID NO: 6578 - DNA, 20 bp, Artificial Sequence
  Description of Artificial Sequence: Synthetic oligonucleotide
gtggcactggtccagtcatg

SEQ ID NO: 6579 - DNA, 20 bp, Artificial Sequence
  Description of Artificial Sequence: Synthetic oligonucleotide
tggcactggtccagtcatgg

SEQ ID NO: 6580 - DNA, 20 bp, Artificial Sequence
  Description of Artificial Sequence: Synthetic oligonucleotide
ggcactggtccagtcatggg

SEQ ID NO: 6581 - DNA, 20 bp, Artificial Sequence
  Description of Artificial Sequence: Synthetic oligonucleotide
gcactggtccagtcatgggg

SEQ ID NO: 6582 - DNA, 20 bp, Artificial Sequence
  Description of Artificial Sequence: Synthetic oligonucleotide
cactggtccagtcatggggc

SEQ ID NO: 6583 - DNA, 20 bp, Artificial Sequence
  Description of Artificial Sequence: Synthetic oligonucleotide
actggtccagtcatggggcc

SEQ ID NO: 6584 - DNA, 20 bp, Artificial Sequence
  Description of Artificial Sequence: Synthetic oligonucleotide
ctggtccagtcatggggccc

SEQ ID NO: 6585 - DNA, 20 bp, Artificial Sequence
  Description of Artificial Sequence: Synthetic oligonucleotide
tggtccagtcatggggcccc

SEQ ID NO: 6586 - DNA, 20 bp, Artificial Sequence
  Description of Artificial Sequence: Synthetic oligonucleotide
ggtccagtcatggggcccct

SEQ ID NO: 6587 - DNA, 20 bp, Artificial Sequence
  Description of Artificial Sequence: Synthetic oligonucleotide
gtccagtcatggggcccctg

SEQ ID NO: 6588 - DNA, 20 bp, Artificial Sequence
  Description of Artificial Sequence: Synthetic oligonucleotide
tccagtcatggggcccctgg

SEQ ID NO: 6589 - DNA, 20 bp, Artificial Sequence
  Description of Artificial Sequence: Synthetic oligonucleotide
ccagtcatggggcccctggc

SEQ ID NO: 6590 - DNA, 20 bp, Artificial Sequence
  Description of Artificial Sequence: Synthetic oligonucleotide
cagtcatggggcccctggcc

SEQ ID NO: 6591 - DNA, 20 bp, Artificial Sequence
  Description of Artificial Sequence: Synthetic oligonucleotide
agtcatggggcccctggcct

SEQ ID NO: 6592 - DNA, 20 bp, Artificial Sequence
  Description of Artificial Sequence: Synthetic oligonucleotide
gtcatggggcccctggcctt

SEQ ID NO: 6593 - DNA, 20 bp, Artificial Sequence
  Description of Artificial Sequence: Synthetic oligonucleotide
tcatggggcccctggccttg

SEQ ID NO: 6594 - DNA, 20 bp, Artificial Sequence
  Description of Artificial Sequence: Synthetic oligonucleotide
catggggcccctggccttgt

SEQ ID NO: 6595 - DNA, 20 bp, Artificial Sequence
  Description of Artificial Sequence: Synthetic oligonucleotide
atggggcccctggccttgtg

SEQ ID NO: 6596 - DNA, 20 bp, Artificial Sequence
  Description of Artificial Sequence: Synthetic oligonucleotide
tggggcccctggccttgtgc

SEQ ID NO: 6597 - DNA, 20 bp, Artificial Sequence
  Description of Artificial Sequence: Synthetic oligonucleotide
ggggcccctggccttgtgct

SEQ ID NO: 6598 - DNA, 20 bp, Artificial Sequence
  Description of Artificial Sequence: Synthetic oligonucleotide
gggcccctggccttgtgctt

SEQ ID NO: 6599 - DNA, 20 bp, Artificial Sequence
  Description of Artificial Sequence: Synthetic oligonucleotide
ggcccctggccttgtgctta

SEQ ID NO: 6600 - DNA, 20 bp, Artificial Sequence
  Description of Artificial Sequence: Synthetic oligonucleotide
gcccctggccttgtgcttac

SEQ ID NO: 6601 - DNA, 20 bp, Artificial Sequence
  Description of Artificial Sequence: Synthetic oligonucleotide
cccctggccttgtgcttacc

SEQ ID NO: 6602 - DNA, 20 bp, Artificial Sequence
  Description of Artificial Sequence: Synthetic oligonucleotide
ccctggccttgtgcttacct

SEQ ID NO: 6603 - DNA, 20 bp, Artificial Sequence
  Description of Artificial Sequence: Synthetic oligonucleotide
cctggccttgtgcttacctc

SEQ ID NO: 6604 - DNA, 20 bp, Artificial Sequence
  Description of Artificial Sequence: Synthetic oligonucleotide
ctggccttgtgcttacctcc

SEQ ID NO: 6605 - DNA, 20 bp, Artificial Sequence
  Description of Artificial Sequence: Synthetic oligonucleotide
tggccttgtgcttacctcca

SEQ ID NO: 6606 - DNA, 20 bp, Artificial Sequence
  Description of Artificial Sequence: Synthetic oligonucleotide
ggccttgtgcttacctccat

SEQ ID NO: 6607 - DNA, 20 bp, Artificial Sequence
  Description of Artificial Sequence: Synthetic oligonucleotide
gccttgtgcttacctccatc

SEQ ID NO: 6608 - DNA, 20 bp, Artificial Sequence
  Description of Artificial Sequence: Synthetic oligonucleotide
ccttgtgcttacctccatct

SEQ ID NO: 6609 - DNA, 20 bp, Artificial Sequence
  Description of Artificial Sequence: Synthetic oligonucleotide
cttgtgcttacctccatctc

SEQ ID NO: 6610 - DNA, 20 bp, Artificial Sequence
  Description of Artificial Sequence: Synthetic oligonucleotide
ttgtgcttacctccatctct

SEQ ID NO: 6611 - DNA, 20 bp, Artificial Sequence
  Description of Artificial Sequence: Synthetic oligonucleotide
tgtgcttacctccatctcta

SEQ ID NO: 6612 - DNA, 20 bp, Artificial Sequence
  Description of Artificial Sequence: Synthetic oligonucleotide
gtgcttacctccatctctac

SEQ ID NO: 6613 - DNA, 20 bp, Artificial Sequence
  Description of Artificial Sequence: Synthetic oligonucleotide
tgcttacctccatctctaca

SEQ ID NO: 6614 - DNA, 20 bp, Artificial Sequence
  Description of Artificial Sequence: Synthetic oligonucleotide
gcttacctccatctctacac

SEQ ID NO: 6615 - DNA, 20 bp, Artificial Sequence
  Description of Artificial Sequence: Synthetic oligonucleotide
cttacctccatctctacacg

SEQ ID NO: 6616 - DNA, 20 bp, Artificial Sequence
  Description of Artificial Sequence: Synthetic oligonucleotide
ttacctccatctctacacgc

SEQ ID NO: 6617 - DNA, 20 bp, Artificial Sequence
  Description of Artificial Sequence: Synthetic oligonucleotide
tacctccatctctacacgca

SEQ ID NO: 6618 - DNA, 20 bp, Artificial Sequence
  Description of Artificial Sequence: Synthetic oligonucleotide
acctccatctctacacgcag

SEQ ID NO: 6619 - DNA, 20 bp, Artificial Sequence
  Description of Artificial Sequence: Synthetic oligonucleotide
cctccatctctacacgcagc

SEQ ID NO: 6620 - DNA, 20 bp, Artificial Sequence
  Description of Artificial Sequence: Synthetic oligonucleotide
ctccatctctacacgcagcc

SEQ ID NO: 6621 - DNA, 20 bp, Artificial Sequence
  Description of Artificial Sequence: Synthetic oligonucleotide
tccatctctacacgcagccg

SEQ ID NO: 6622 - DNA, 20 bp, Artificial Sequence
  Description of Artificial Sequence: Synthetic oligonucleotide
ccatctctacacgcagccgg

SEQ ID NO: 6623 - DNA, 20 bp, Artificial Sequence
  Description of Artificial Sequence: Synthetic oligonucleotide
catctctacacgcagccggg

SEQ ID NO: 6624 - DNA, 20 bp, Artificial Sequence
  Description of Artificial Sequence: Synthetic oligonucleotide
atctctacacgcagccgggt

SEQ ID NO: 6625 - DNA, 20 bp, Artificial Sequence
  Description of Artificial Sequence: Synthetic oligonucleotide
tctctacacgcagccgggtt

SEQ ID NO: 6626 - DNA, 20 bp, Artificial Sequence
  Description of Artificial Sequence: Synthetic oligonucleotide
ctctacacgcagccgggttg

SEQ ID NO: 6627 - DNA, 20 bp, Artificial Sequence
  Description of Artificial Sequence: Synthetic oligonucleotide
tctacacgcagccgggttgg

SEQ ID NO: 6628 - DNA, 20 bp, Artificial Sequence
  Description of Artificial Sequence: Synthetic oligonucleotide
ctacacgcagccgggttggc

SEQ ID NO: 6629 - DNA, 20 bp, Artificial Sequence
  Description of Artificial Sequence: Synthetic oligonucleotide
tacacgcagccgggttggct

SEQ ID NO: 6630 - DNA, 20 bp, Artificial Sequence
  Description of Artificial Sequence: Synthetic oligonucleotide
acacgcagccgggttggctg

SEQ ID NO: 6631 - DNA, 20 bp, Artificial Sequence
  Description of Artificial Sequence: Synthetic oligonucleotide
cacgcagccgggttggctgt

SEQ ID NO: 6632 - DNA, 20 bp, Artificial Sequence
  Description of Artificial Sequence: Synthetic oligonucleotide
acgcagccgggttggctgtc

SEQ ID NO: 6633 - DNA, 20 bp, Artificial Sequence
  Description of Artificial Sequence: Synthetic oligonucleotide
cgcagccgggttggctgtct

SEQ ID NO: 6634 - DNA, 20 bp, Artificial Sequence
  Description of Artificial Sequence: Synthetic oligonucleotide
gcagccgggttggctgtctg

SEQ ID NO: 6635 - DNA, 20 bp, Artificial Sequence
  Description of Artificial Sequence: Synthetic oligonucleotide
cagccgggttggctgtctgg

SEQ ID NO: 6636 - DNA, 20 bp, Artificial Sequence
  Description of Artificial Sequence: Synthetic oligonucleotide
agccgggttggctgtctgga

SEQ ID NO: 6637 - DNA, 20 bp, Artificial Sequence
  Description of Artificial Sequence: Synthetic oligonucleotide
gccgggttggctgtctggag

SEQ ID NO: 6638 - DNA, 20 bp, Artificial Sequence
  Description of Artificial Sequence: Synthetic oligonucleotide
ccgggttggctgtctggaga

SEQ ID NO: 6639 - DNA, 20 bp, Artificial Sequence
  Description of Artificial Sequence: Synthetic oligonucleotide
cgggttggctgtctggagag

SEQ ID NO: 6640 - DNA, 20 bp, Artificial Sequence
  Description of Artificial Sequence: Synthetic oligonucleotide
gggttggctgtctggagagc

SEQ ID NO: 6641 - DNA, 20 bp, Artificial Sequence
  Description of Artificial Sequence: Synthetic oligonucleotide
ggttggctgtctggagagcc

SEQ ID NO: 6642 - DNA, 20 bp, Artificial Sequence
  Description of Artificial Sequence: Synthetic oligonucleotide
gttggctgtctggagagccg

SEQ ID NO: 6643 - DNA, 20 bp, Artificial Sequence
  Description of Artificial Sequence: Synthetic oligonucleotide
ttggctgtctggagagccgg

SEQ ID NO: 6644 - DNA, 20 bp, Artificial Sequence
  Description of Artificial Sequence: Synthetic oligonucleotide
tggctgtctggagagccggt

SEQ ID NO: 6645 - DNA, 20 bp, Artificial Sequence
  Description of Artificial Sequence: Synthetic oligonucleotide
ggctgtctggagagccggtg

SEQ ID NO: 6646 - DNA, 20 bp, Artificial Sequence
  Description of Artificial Sequence: Synthetic oligonucleotide
gctgtctggagagccggtgg

SEQ ID NO: 6647 - DNA, 20 bp, Artificial Sequence
  Description of Artificial Sequence: Synthetic oligonucleotide
ctgtctggagagccggtgga

SEQ ID NO: 6648 - DNA, 20 bp, Artificial Sequence
  Description of Artificial Sequence: Synthetic oligonucleotide
tgtctggagagccggtggat

SEQ ID NO: 6649 - DNA, 20 bp, Artificial Sequence
  Description of Artificial Sequence: Synthetic oligonucleotide
gtctggagagccggtggatg

SEQ ID NO: 6650 - DNA, 20 bp, Artificial Sequence
  Description of Artificial Sequence: Synthetic oligonucleotide
tctggagagccggtggatgt

SEQ ID NO: 6651 - DNA, 20 bp, Artificial Sequence
  Description of Artificial Sequence: Synthetic oligonucleotide
ctggagagccggtggatgtg

SEQ ID NO: 6652 - DNA, 20 bp, Artificial Sequence
  Description of Artificial Sequence: Synthetic oligonucleotide
tggagagccggtggatgtgt

SEQ ID NO: 6653 - DNA, 20 bp, Artificial Sequence
  Description of Artificial Sequence: Synthetic oligonucleotide
ggagagccggtggatgtgtt

SEQ ID NO: 6654 - DNA, 20 bp, Artificial Sequence
  Description of Artificial Sequence: Synthetic oligonucleotide
gagagccggtggatgtgttc

SEQ ID NO: 6655 - DNA, 20 bp, Artificial Sequence
  Description of Artificial Sequence: Synthetic oligonucleotide
agagccggtggatgtgttcg

SEQ ID NO: 6656 - DNA, 20 bp, Artificial Sequence
  Description of Artificial Sequence: Synthetic oligonucleotide
gagccggtggatgtgttcgt

SEQ ID NO: 6657 - DNA, 20 bp, Artificial Sequence
  Description of Artificial Sequence: Synthetic oligonucleotide
agccggtggatgtgttcgtt

SEQ ID NO: 6658 - DNA, 20 bp, Artificial Sequence
  Description of Artificial Sequence: Synthetic oligonucleotide
gccggtggatgtgttcgttc

SEQ ID NO: 6659 - DNA, 20 bp, Artificial Sequence
  Description of Artificial Sequence: Synthetic oligonucleotide
ccggtggatgtgttcgttcc

SEQ ID NO: 6660 - DNA, 20 bp, Artificial Sequence
  Description of Artificial Sequence: Synthetic oligonucleotide
cggtggatgtgttcgttccc

SEQ ID NO: 6661 - DNA, 20 bp, Artificial Sequence
  Description of Artificial Sequence: Synthetic oligonucleotide
ggtggatgtgttcgttcccc

SEQ ID NO: 6662 - DNA, 20 bp, Artificial Sequence
  Description of Artificial Sequence: Synthetic oligonucleotide
gtggatgtgttcgttcccca

SEQ ID NO: 6663 - DNA, 20 bp, Artificial Sequence
  Description of Artificial Sequence: Synthetic oligonucleotide
tggatgtgttcgttccccag

SEQ ID NO: 6664 - DNA, 20 bp, Artificial Sequence
  Description of Artificial Sequence: Synthetic oligonucleotide
ggatgtgttcgttccccagc

SEQ ID NO: 6665 - DNA, 20 bp, Artificial Sequence
  Description of Artificial Sequence: Synthetic oligonucleotide
gatgtgttcgttccccagcc

SEQ ID NO: 6666 - DNA, 20 bp, Artificial Sequence
  Description of Artificial Sequence: Synthetic oligonucleotide
atgtgttcgttccccagcca

SEQ ID NO: 6667 - DNA, 20 bp, Artificial Sequence
  Description of Artificial Sequence: Synthetic oligonucleotide
tgtgttcgttccccagccag

SEQ ID NO: 6668 - DNA, 20 bp, Artificial Sequence
  Description of Artificial Sequence: Synthetic oligonucleotide
gtgttcgttccccagccaga

SEQ ID NO: 6669 - DNA, 20 bp, Artificial Sequence
  Description of Artificial Sequence: Synthetic oligonucleotide
tgttcgttccccagccagaa

SEQ ID NO: 6670 - DNA, 20 bp, Artificial Sequence
  Description of Artificial Sequence: Synthetic oligonucleotide
gttcgttccccagccagaag

SEQ ID NO: 6671 - DNA, 20 bp, Artificial Sequence
  Description of Artificial Sequence: Synthetic oligonucleotide
ttcgttccccagccagaagt

SEQ ID NO: 6672 - DNA, 20 bp, Artificial Sequence
  Description of Artificial Sequence: Synthetic oligonucleotide
tcgttccccagccagaagtc

SEQ ID NO: 6673 - DNA, 20 bp, Artificial Sequence
  Description of Artificial Sequence: Synthetic oligonucleotide
cgttccccagccagaagtcc

SEQ ID NO: 6674 - DNA, 20 bp, Artificial Sequence
  Description of Artificial Sequence: Synthetic oligonucleotide
gttccccagccagaagtccc

SEQ ID NO: 6675 - DNA, 20 bp, Artificial Sequence
  Description of Artificial Sequence: Synthetic oligonucleotide
ttccccagccagaagtcccc

SEQ ID NO: 6676 - DNA, 20 bp, Artificial Sequence
  Description of Artificial Sequence: Synthetic oligonucleotide
tccccagccagaagtcccca

SEQ ID NO: 6677 - DNA, 20 bp, Artificial Sequence
  Description of Artificial Sequence: Synthetic oligonucleotide
ccccagccagaagtccccac

SEQ ID NO: 6678 - DNA, 20 bp, Artificial Sequence
  Description of Artificial Sequence: Synthetic oligonucleotide
cccagccagaagtccccacg

SEQ ID NO: 6679 - DNA, 20 bp, Artificial Sequence
  Description of Artificial Sequence: Synthetic oligonucleotide
ccagccagaagtccccacgg

SEQ ID NO: 6680 - DNA, 20 bp, Artificial Sequence
  Description of Artificial Sequence: Synthetic oligonucleotide
cagccagaagtccccacgga

SEQ ID NO: 6681 - DNA, 20 bp, Artificial Sequence
  Description of Artificial Sequence: Synthetic oligonucleotide
agccagaagtccccacggat

SEQ ID NO: 6682 - DNA, 20 bp, Artificial Sequence
  Description of Artificial Sequence: Synthetic oligonucleotide
gccagaagtccccacggatg

SEQ ID NO: 6683 - DNA, 20 bp, Artificial Sequence
  Description of Artificial Sequence: Synthetic oligonucleotide
ccagaagtccccacggatgc

SEQ ID NO: 6684 - DNA, 20 bp, Artificial Sequence
  Description of Artificial Sequence: Synthetic oligonucleotide
cagaagtccccacggatgct

SEQ ID NO: 6685 - DNA, 20 bp, Artificial Sequence
  Description of Artificial Sequence: Synthetic oligonucleotide
agaagtccccacggatgctg

SEQ ID NO: 6686 - DNA, 20 bp, Artificial Sequence
  Description of Artificial Sequence: Synthetic oligonucleotide
gaagtccccacggatgctgc

SEQ ID NO: 6687 - DNA, 20 bp, Artificial Sequence
  Description of Artificial Sequence: Synthetic oligonucleotide
aagtccccacggatgctgcc

SEQ ID NO: 6688 - DNA, 20 bp, Artificial Sequence
  Description of Artificial Sequence: Synthetic oligonucleotide
agtccccacggatgctgcca

SEQ ID NO: 6689 - DNA, 20 bp, Artificial Sequence
  Description of Artificial Sequence: Synthetic oligonucleotide
gtccccacggatgctgccaa

SEQ ID NO: 6690 - DNA, 20 bp, Artificial Sequence
  Description of Artificial Sequence: Synthetic oligonucleotide
tccccacggatgctgccaaa

SEQ ID NO: 6691 - DNA, 20 bp, Artificial Sequence
  Description of Artificial Sequence: Synthetic oligonucleotide
ccccacggatgctgccaaag

SEQ ID NO: 6692 - DNA, 20 bp, Artificial Sequence
  Description of Artificial Sequence: Synthetic oligonucleotide
cccacggatgctgccaaagc

SEQ ID NO: 6693 - DNA, 20 bp, Artificial Sequence
  Description of Artificial Sequence: Synthetic oligonucleotide
ccacggatgctgccaaagcc

SEQ ID NO: 6694 - DNA, 20 bp, Artificial Sequence
  Description of Artificial Sequence: Synthetic oligonucleotide
cacggatgctgccaaagccc

SEQ ID NO: 6695 - DNA, 20 bp, Artificial Sequence
  Description of Artificial Sequence: Synthetic oligonucleotide
acggatgctgccaaagccct

SEQ ID NO: 6696 - DNA, 20 bp, Artificial Sequence
  Description of Artificial Sequence: Synthetic oligonucleotide
cggatgctgccaaagccctg

SEQ ID NO: 6697 - DNA, 20 bp, Artificial Sequence
  Description of Artificial Sequence: Synthetic oligonucleotide
ggatgctgccaaagccctgc

SEQ ID NO: 6698 - DNA, 20 bp, Artificial Sequence
  Description of Artificial Sequence: Synthetic oligonucleotide
gatgctgccaaagccctgct

SEQ ID NO: 6699 - DNA, 20 bp, Artificial Sequence
  Description of Artificial Sequence: Synthetic oligonucleotide
atgctgccaaagccctgctt

SEQ ID NO: 6700 - DNA, 20 bp, Artificial Sequence
  Description of Artificial Sequence: Synthetic oligonucleotide
tgctgccaaagccctgcttg

SEQ ID NO: 6701 - DNA, 20 bp, Artificial Sequence
  Description of Artificial Sequence: Synthetic oligonucleotide
gctgccaaagccctgcttgt

SEQ ID NO: 6702 - DNA, 20 bp, Artificial Sequence
  Description of Artificial Sequence: Synthetic oligonucleotide
ctgccaaagccctgcttgta

SEQ ID NO: 6703 - DNA, 20 bp, Artificial Sequence
  Description of Artificial Sequence: Synthetic oligonucleotide
tgccaaagccctgcttgtac

SEQ ID NO: 6704 - DNA, 20 bp, Artificial Sequence
  Description of Artificial Sequence: Synthetic oligonucleotide
gccaaagccctgcttgtact

SEQ ID NO: 6705 - DNA, 20 bp, Artificial Sequence
  Description of Artificial Sequence: Synthetic oligonucleotide
ccaaagccctgcttgtactg

SEQ ID NO: 6706 - DNA, 20 bp, Artificial Sequence
  Description of Artificial Sequence: Synthetic oligonucleotide
caaagccctgcttgtactgc

SEQ ID NO: 6707 - DNA, 20 bp, Artificial Sequence
  Description of Artificial Sequence: Synthetic oligonucleotide
aaagccctgcttgtactgct

SEQ ID NO: 6708 - DNA, 20 bp, Artificial Sequence
  Description of Artificial Sequence: Synthetic oligonucleotide
aagccctgcttgtactgctt

SEQ ID NO: 6709 - DNA, 20 bp, Artificial Sequence
  Description of Artificial Sequence: Synthetic oligonucleotide
agccctgcttgtactgcttc

SEQ ID NO: 6710 - DNA, 20 bp, Artificial Sequence
  Description of Artificial Sequence: Synthetic oligonucleotide
gccctgcttgtactgcttcc

SEQ ID NO: 6711 - DNA, 20 bp, Artificial Sequence
  Description of Artificial Sequence: Synthetic oligonucleotide
ccctgcttgtactgcttcca

SEQ ID NO: 6712 - DNA, 20 bp, Artificial Sequence
  Description of Artificial Sequence: Synthetic oligonucleotide
cctgcttgtactgcttccag

SEQ ID NO: 6713 - DNA, 20 bp, Artificial Sequence
  Description of Artificial Sequence: Synthetic oligonucleotide
ctgcttgtactgcttccagt

SEQ ID NO: 6714 - DNA, 20 bp, Artificial Sequence
  Description of Artificial Sequence: Synthetic oligonucleotide
tgcttgtactgcttccagtc

SEQ ID NO: 6715 - DNA, 20 bp, Artificial Sequence
  Description of Artificial Sequence: Synthetic oligonucleotide
gcttgtactgcttccagtcc

SEQ ID NO: 6716 - DNA, 20 bp, Artificial Sequence
  Description of Artificial Sequence: Synthetic oligonucleotide
cttgtactgcttccagtccc

SEQ ID NO: 6717 - DNA, 20 bp, Artificial Sequence
  Description of Artificial Sequence: Synthetic oligonucleotide
ttgtactgcttccagtcccg

SEQ ID NO: 6718 - DNA, 20 bp, Artificial Sequence
  Description of Artificial Sequence: Synthetic oligonucleotide
tgtactgcttccagtcccgg

SEQ ID NO: 6719 - DNA, 20 bp, Artificial Sequence
  Description of Artificial Sequence: Synthetic oligonucleotide
gtactgcttccagtcccggt

SEQ ID NO: 6720 - DNA, 20 bp, Artificial Sequence
  Description of Artificial Sequence: Synthetic oligonucleotide
tactgcttccagtcccggta

SEQ ID NO: 6721 - DNA, 20 bp, Artificial Sequence
  Description of Artificial Sequence: Synthetic oligonucleotide
actgcttccagtcccggtag

SEQ ID NO: 6722 - DNA, 20 bp, Artificial Sequence
  Description of Artificial Sequence: Synthetic oligonucleotide
ctgcttccagtcccggtaga

SEQ ID NO: 6723 - DNA, 20 bp, Artificial Sequence
  Description of Artificial Sequence: Synthetic oligonucleotide
tgcttccagtcccggtagaa

SEQ ID NO: 6724 - DNA, 20 bp, Artificial Sequence
  Description of Artificial Sequence: Synthetic oligonucleotide
gcttccagtcccggtagaag

SEQ ID NO: 6725 - DNA, 20 bp, Artificial Sequence
  Description of Artificial Sequence: Synthetic oligonucleotide
cttccagtcccggtagaagg

SEQ ID NO: 6726 - DNA, 20 bp, Artificial Sequence
  Description of Artificial Sequence: Synthetic oligonucleotide
ttccagtcccggtagaagga

SEQ ID NO: 6727 - DNA, 20 bp, Artificial Sequence
  Description of Artificial Sequence: Synthetic oligonucleotide
tccagtcccggtagaaggag

SEQ ID NO: 6728 - DNA, 20 bp, Artificial Sequence
  Description of Artificial Sequence: Synthetic oligonucleotide
ccagtcccggtagaaggaga

SEQ ID NO: 6729 - DNA, 20 bp, Artificial Sequence
  Description of Artificial Sequence: Synthetic oligonucleotide
cagtcccggtagaaggagac

SEQ ID NO: 6730 - DNA, 20 bp, Artificial Sequence
  Description of Artificial Sequence: Synthetic oligonucleotide
agtcccggtagaaggagaca

SEQ ID NO: 6731 - DNA, 20 bp, Artificial Sequence
  Description of Artificial Sequence: Synthetic oligonucleotide
gtcccggtagaaggagacaa

SEQ ID NO: 6732 - DNA, 20 bp, Artificial Sequence
  Description of Artificial Sequence: Synthetic oligonucleotide
tcccggtagaaggagacaag

SEQ ID NO: 6733 - DNA, 20 bp, Artificial Sequence
  Description of Artificial Sequence: Synthetic oligonucleotide
cccggtagaaggagacaagg

SEQ ID NO: 6734 - DNA, 20 bp, Artificial Sequence
  Description of Artificial Sequence: Synthetic oligonucleotide
ccggtagaaggagacaaggc

SEQ ID NO: 6735 - DNA, 20 bp, Artificial Sequence
  Description of Artificial Sequence: Synthetic oligonucleotide
cggtagaaggagacaaggcc

SEQ ID NO: 6736 - DNA, 20 bp, Artificial Sequence
  Description of Artificial Sequence: Synthetic oligonucleotide
ggtagaaggagacaaggcca

SEQ ID NO: 6737 - DNA, 20 bp, Artificial Sequence
  Description of Artificial Sequence: Synthetic oligonucleotide
gtagaaggagacaaggccac

SEQ ID NO: 6738 - DNA, 20 bp, Artificial Sequence
  Description of Artificial Sequence: Synthetic oligonucleotide
tagaaggagacaaggccact

SEQ ID NO: 6739 - DNA, 20 bp, Artificial Sequence
  Description of Artificial Sequence: Synthetic oligonucleotide
agaaggagacaaggccactt

SEQ ID NO: 6740 - DNA, 20 bp, Artificial Sequence
  Description of Artificial Sequence: Synthetic oligonucleotide
gaaggagacaaggccacttt

SEQ ID NO: 6741 - DNA, 20 bp, Artificial Sequence
  Description of Artificial Sequence: Synthetic oligonucleotide
aaggagacaaggccactttt

SEQ ID NO: 6742 - DNA, 20 bp, Artificial Sequence
  Description of Artificial Sequence: Synthetic oligonucleotide
aggagacaaggccacttttt

SEQ ID NO: 6743 - DNA, 20 bp, Artificial Sequence
  Description of Artificial Sequence: Synthetic oligonucleotide
ggagacaaggccactttttc

SEQ ID NO: 6744 - DNA, 20 bp, Artificial Sequence
  Description of Artificial Sequence: Synthetic oligonucleotide
gagacaaggccactttttcg

SEQ ID NO: 6745 - DNA, 20 bp, Artificial Sequence
  Description of Artificial Sequence: Synthetic oligonucleotide
agacaaggccactttttcgt

SEQ ID NO: 6746 - DNA, 20 bp, Artificial Sequence
  Description of Artificial Sequence: Synthetic oligonucleotide
gacaaggccactttttcgtc

SEQ ID NO: 6747 - DNA, 20 bp, Artificial Sequence
  Description of Artificial Sequence: Synthetic oligonucleotide
acaaggccactttttcgtct

SEQ ID NO: 6748 - DNA, 20 bp, Artificial Sequence
  Description of Artificial Sequence: Synthetic oligonucleotide
caaggccactttttcgtctc

SEQ ID NO: 6749 - DNA, 20 bp, Artificial Sequence
  Description of Artificial Sequence: Synthetic oligonucleotide
aaggccactttttcgtctct

SEQ ID NO: 6750 - DNA, 20 bp, Artificial Sequence
  Description of Artificial Sequence: Synthetic oligonucleotide
aggccactttttcgtctctg

SEQ ID NO: 6751 - DNA, 20 bp, Artificial Sequence
  Description of Artificial Sequence: Synthetic oligonucleotide
ggccactttttcgtctctgg

SEQ ID NO: 6752 - DNA, 20 bp, Artificial Sequence
  Description of Artificial Sequence: Synthetic oligonucleotide
gccactttttcgtctctgga

SEQ ID NO: 6753 - DNA, 20 bp, Artificial Sequence
  Description of Artificial Sequence: Synthetic oligonucleotide
ccactttttcgtctctggat

SEQ ID NO: 6754 - DNA, 20 bp, Artificial Sequence
  Description of Artificial Sequence: Synthetic oligonucleotide
cactttttcgtctctggatg

SEQ ID NO: 6755 - DNA, 20 bp, Artificial Sequence
  Description of Artificial Sequence: Synthetic oligonucleotide
actttttcgtctctggatga

SEQ ID NO: 6756 - DNA, 20 bp, Artificial Sequence
  Description of Artificial Sequence: Synthetic oligonucleotide
ctttttcgtctctggatgat

SEQ ID NO: 6757 - DNA, 20 bp, Artificial Sequence
  Description of Artificial Sequence: Synthetic oligonucleotide
tttttcgtctctggatgatg

SEQ ID NO: 6758 - DNA, 20 bp, Artificial Sequence
  Description of Artificial Sequence: Synthetic oligonucleotide
ttttcgtctctggatgatgg

SEQ ID NO: 6759 - DNA, 20 bp, Artificial Sequence
  Description of Artificial Sequence: Synthetic oligonucleotide
tttcgtctctggatgatggt

SEQ ID NO: 6760 - DNA, 20 bp, Artificial Sequence
  Description of Artificial Sequence: Synthetic oligonucleotide
ttcgtctctggatgatggtc

SEQ ID NO: 6761 - DNA, 20 bp, Artificial Sequence
  Description of Artificial Sequence: Synthetic oligonucleotide
tcgtctctggatgatggtcc

SEQ ID NO: 6762 - DNA, 20 bp, Artificial Sequence
  Description of Artificial Sequence: Synthetic oligonucleotide
cgtctctggatgatggtcca

SEQ ID NO: 6763 - DNA, 20 bp, Artificial Sequence
  Description of Artificial Sequence: Synthetic oligonucleotide
gtctctggatgatggtccag

SEQ ID NO: 6764 - DNA, 20 bp, Artificial Sequence
  Description of Artificial Sequence: Synthetic oligonucleotide
tctctggatgatggtccagc

SEQ ID NO: 6765 - DNA, 20 bp, Artificial Sequence
  Description of Artificial Sequence: Synthetic oligonucleotide
ctctggatgatggtccagcc

SEQ ID NO: 6766 - DNA, 20 bp, Artificial Sequence
  Description of Artificial Sequence: Synthetic oligonucleotide
tctggatgatggtccagcct

SEQ ID NO: 6767 - DNA, 20 bp, Artificial Sequence
  Description of Artificial Sequence: Synthetic oligonucleotide
ctggatgatggtccagcctc

SEQ ID NO: 6768 - DNA, 20 bp, Artificial Sequence
  Description of Artificial Sequence: Synthetic oligonucleotide
tggatgatggtccagcctcc

SEQ ID NO: 6769 - DNA, 20 bp, Artificial Sequence
  Description of Artificial Sequence: Synthetic oligonucleotide
ggatgatggtccagcctccg

SEQ ID NO: 6770 - DNA, 20 bp, Artificial Sequence
  Description of Artificial Sequence: Synthetic oligonucleotide
gatgatggtccagcctccgc

SEQ ID NO: 6771 - DNA, 20 bp, Artificial Sequence
  Description of Artificial Sequence: Synthetic oligonucleotide
atgatggtccagcctccgcc

SEQ ID NO: 6772 - DNA, 20 bp, Artificial Sequence
  Description of Artificial Sequence: Synthetic oligonucleotide
tgatggtccagcctccgcct

SEQ ID NO: 6773 - DNA, 20 bp, Artificial Sequence
  Description of Artificial Sequence: Synthetic oligonucleotide
gatggtccagcctccgcctg

SEQ ID NO: 6774 - DNA, 20 bp, Artificial Sequence
  Description of Artificial Sequence: Synthetic oligonucleotide
atggtccagcctccgcctga

SEQ ID NO: 6775 - DNA, 20 bp, Artificial Sequence
  Description of Artificial Sequence: Synthetic oligonucleotide
tggtccagcctccgcctgaa

SEQ ID NO: 6776 - DNA, 20 bp, Artificial Sequence
  Description of Artificial Sequence: Synthetic oligonucleotide
ggtccagcctccgcctgaag

SEQ ID NO: 6777 - DNA, 20 bp, Artificial Sequence
  Description of Artificial Sequence: Synthetic oligonucleotide
gtccagcctccgcctgaagt

SEQ ID NO: 6778 - DNA, 20 bp, Artificial Sequence
  Description of Artificial Sequence: Synthetic oligonucleotide
tccagcctccgcctgaagtc

SEQ ID NO: 6779 - DNA, 20 bp, Artificial Sequence
  Description of Artificial Sequence: Synthetic oligonucleotide
ccagcctccgcctgaagtct

SEQ ID NO: 6780 - DNA, 20 bp, Artificial Sequence
  Description of Artificial Sequence: Synthetic oligonucleotide
cagcctccgcctgaagtctc

SEQ ID NO: 6781 - DNA, 20 bp, Artificial Sequence
  Description of Artificial Sequence: Synthetic oligonucleotide
agcctccgcctgaagtctcc

SEQ ID NO: 6782 - DNA, 20 bp, Artificial Sequence
  Description of Artificial Sequence: Synthetic oligonucleotide
gcctccgcctgaagtctcca

SEQ ID NO: 6783 - DNA, 20 bp, Artificial Sequence
  Description of Artificial Sequence: Synthetic oligonucleotide
cctccgcctgaagtctccat

SEQ ID NO: 6784 - DNA, 20 bp, Artificial Sequence
  Description of Artificial Sequence: Synthetic oligonucleotide
ctccgcctgaagtctccatg

SEQ ID NO: 6785 - DNA, 20 bp, Artificial Sequence
  Description of Artificial Sequence: Synthetic oligonucleotide
tccgcctgaagtctccatgt

SEQ ID NO: 6786 - DNA, 20 bp, Artificial Sequence
  Description of Artificial Sequence: Synthetic oligonucleotide
ccgcctgaagtctccatgtc

SEQ ID NO: 6787 - DNA, 20 bp, Artificial Sequence
  Description of Artificial Sequence: Synthetic oligonucleotide
cgcctgaagtctccatgtca

SEQ ID NO: 6788 - DNA, 20 bp, Artificial Sequence
  Description of Artificial Sequence: Synthetic oligonucleotide
gcctgaagtctccatgtcac

SEQ ID NO: 6789 - DNA, 20 bp, Artificial Sequence
  Description of Artificial Sequence: Synthetic oligonucleotide
cctgaagtctccatgtcaca

SEQ ID NO: 6790 - DNA, 20 bp, Artificial Sequence
  Description of Artificial Sequence: Synthetic oligonucleotide
ctgaagtctccatgtcacag

SEQ ID NO: 6791 - DNA, 20 bp, Artificial Sequence
  Description of Artificial Sequence: Synthetic oligonucleotide
tgaagtctccatgtcacaga

SEQ ID NO: 6792 - DNA, 20 bp, Artificial Sequence
  Description of Artificial Sequence: Synthetic oligonucleotide
gaagtctccatgtcacagaa

SEQ ID NO: 6793 - DNA, 20 bp, Artificial Sequence
  Description of Artificial Sequence: Synthetic oligonucleotide
aagtctccatgtcacagaac

SEQ ID NO: 6794 - DNA, 20 bp, Artificial Sequence
  Description of Artificial Sequence: Synthetic oligonucleotide
agtctccatgtcacagaaca

SEQ ID NO: 6795 - DNA, 20 bp, Artificial Sequence
  Description of Artificial Sequence: Synthetic oligonucleotide
gtctccatgtcacagaacac

SEQ ID NO: 6796 - DNA, 20 bp, Artificial Sequence
  Description of Artificial Sequence: Synthetic oligonucleotide
tctccatgtcacagaacacc

SEQ ID NO: 6797 - DNA, 20 bp, Artificial Sequence
  Description of Artificial Sequence: Synthetic oligonucleotide
ctccatgtcacagaacacct

SEQ ID NO: 6798 - DNA, 20 bp, Artificial Sequence
  Description of Artificial Sequence: Synthetic oligonucleotide
tccatgtcacagaacacctg

SEQ ID NO: 6799 - DNA, 20 bp, Artificial Sequence
  Description of Artificial Sequence: Synthetic oligonucleotide
ccatgtcacagaacacctga

SEQ ID NO: 6800 - DNA, 20 bp, Artificial Sequence
  Description of Artificial Sequence: Synthetic oligonucleotide
catgtcacagaacacctgaa

SEQ ID NO: 6801 - DNA, 20 bp, Artificial Sequence
  Description of Artificial Sequence: Synthetic oligonucleotide
atgtcacagaacacctgaag

SEQ ID NO: 6802 - DNA, 20 bp, Artificial Sequence
  Description of Artificial Sequence: Synthetic oligonucleotide
tgtcacagaacacctgaagc

SEQ ID NO: 6803 - DNA, 20 bp, Artificial Sequence
  Description of Artificial Sequence: Synthetic oligonucleotide
gtcacagaacacctgaagca

SEQ ID NO: 6804 - DNA, 20 bp, Artificial Sequence
  Description of Artificial Sequence: Synthetic oligonucleotide
tcacagaacacctgaagcag

SEQ ID NO: 6805 - DNA, 20 bp, Artificial Sequence
  Description of Artificial Sequence: Synthetic oligonucleotide
cacagaacacctgaagcaga

SEQ ID NO: 6806 - DNA, 20 bp, Artificial Sequence
  Description of Artificial Sequence: Synthetic oligonucleotide
acagaacacctgaagcagag

SEQ ID NO: 6807 - DNA, 20 bp, Artificial Sequence
  Description of Artificial Sequence: Synthetic oligonucleotide
cagaacacctgaagcagagg

SEQ ID NO: 6808 - DNA, 20 bp, Artificial Sequence
  Description of Artificial Sequence: Synthetic oligonucleotide
agaacacctgaagcagaggg

SEQ ID NO: 6809 - DNA, 20 bp, Artificial Sequence
  Description of Artificial Sequence: Synthetic oligonucleotide
gaacacctgaagcagagggg

SEQ ID NO: 6810 - DNA, 20 bp, Artificial Sequence
  Description of Artificial Sequence: Synthetic oligonucleotide
aacacctgaagcagagggga

SEQ ID NO: 6811 - DNA, 20 bp, Artificial Sequence
  Description of Artificial Sequence: Synthetic oligonucleotide
acacctgaagcagaggggat

SEQ ID NO: 6812 - DNA, 20 bp, Artificial Sequence
  Description of Artificial Sequence: Synthetic oligonucleotide
cacctgaagcagaggggata

SEQ ID NO: 6813 - DNA, 20 bp, Artificial Sequence
  Description of Artificial Sequence: Synthetic oligonucleotide
acctgaagcagaggggatac

SEQ ID NO: 6814 - DNA, 20 bp, Artificial Sequence
  Description of Artificial Sequence: Synthetic oligonucleotide
cctgaagcagaggggatact

SEQ ID NO: 6815 - DNA, 20 bp, Artificial Sequence
  Description of Artificial Sequence: Synthetic oligonucleotide
ctgaagcagaggggatactc

SEQ ID NO: 6816 - DNA, 20 bp, Artificial Sequence
  Description of Artificial Sequence: Synthetic oligonucleotide
tgaagcagaggggatactct

SEQ ID NO: 6817 - DNA, 20 bp, Artificial Sequence
  Description of Artificial Sequence: Synthetic oligonucleotide
gaagcagaggggatactctg

SEQ ID NO: 6818 - DNA, 20 bp, Artificial Sequence
  Description of Artificial Sequence: Synthetic oligonucleotide
aagcagaggggatactctgg

SEQ ID NO: 6819 - DNA, 20 bp, Artificial Sequence
  Description of Artificial Sequence: Synthetic oligonucleotide
agcagaggggatactctggt

SEQ ID NO: 6820 - DNA, 20 bp, Artificial Sequence
  Description of Artificial Sequence: Synthetic oligonucleotide
gcagaggggatactctggtg

SEQ ID NO: 6821 - DNA, 20 bp, Artificial Sequence
  Description of Artificial Sequence: Synthetic oligonucleotide
cagaggggatactctggtga

SEQ ID NO: 6822 - DNA, 20 bp, Artificial Sequence
  Description of Artificial Sequence: Synthetic oligonucleotide
agaggggatactctggtgag

SEQ ID NO: 6823 - DNA, 20 bp, Artificial Sequence
  Description of Artificial Sequence: Synthetic oligonucleotide
gaggggatactctggtgagg

SEQ ID NO: 6824 - DNA, 20 bp, Artificial Sequence
  Description of Artificial Sequence: Synthetic oligonucleotide
aggggatactctggtgaggg

SEQ ID NO: 6825 - DNA, 20 bp, Artificial Sequence
  Description of Artificial Sequence: Synthetic oligonucleotide
ggggatactctggtgaggga

SEQ ID NO: 6826 - DNA, 20 bp, Artificial Sequence
  Description of Artificial Sequence: Synthetic oligonucleotide
gggatactctggtgagggac

SEQ ID NO: 6827 - DNA, 20 bp, Artificial Sequence
  Description of Artificial Sequence: Synthetic oligonucleotide
ggatactctggtgagggact

SEQ ID NO: 6828 - DNA, 20 bp, Artificial Sequence
  Description of Artificial Sequence: Synthetic oligonucleotide
gatactctggtgagggactt

SEQ ID NO: 6829 - DNA, 20 bp, Artificial Sequence
  Description of Artificial Sequence: Synthetic oligonucleotide
atactctggtgagggacttg

SEQ ID NO: 6830 - DNA, 20 bp, Artificial Sequence
  Description of Artificial Sequence: Synthetic oligonucleotide
tactctggtgagggacttgc

SEQ ID NO: 6831 - DNA, 20 bp, Artificial Sequence
  Description of Artificial Sequence: Synthetic oligonucleotide
actctggtgagggacttgca

SEQ ID NO: 6832 - DNA, 20 bp, Artificial Sequence
  Description of Artificial Sequence: Synthetic oligonucleotide
ctctggtgagggacttgcag

SEQ ID NO: 6833 - DNA, 20 bp, Artificial Sequence
  Description of Artificial Sequence: Synthetic oligonucleotide
tctggtgagggacttgcagg

SEQ ID NO: 6834 - DNA, 20 bp, Artificial Sequence
  Description of Artificial Sequence: Synthetic oligonucleotide
ctggtgagggacttgcaggg

SEQ ID NO: 6835 - DNA, 20 bp, Artificial Sequence
  Description of Artificial Sequence: Synthetic oligonucleotide
tggtgagggacttgcagggg

SEQ ID NO: 6836 - DNA, 20 bp, Artificial Sequence
  Description of Artificial Sequence: Synthetic oligonucleotide
ggtgagggacttgcaggggc

SEQ ID NO: 6837 - DNA, 20 bp, Artificial Sequence
  Description of Artificial Sequence: Synthetic oligonucleotide
gtgagggacttgcaggggca

SEQ ID NO: 6838 - DNA, 20 bp, Artificial Sequence
  Description of Artificial Sequence: Synthetic oligonucleotide
tgagggacttgcaggggcag

SEQ ID NO: 6839 - DNA, 20 bp, Artificial Sequence
  Description of Artificial Sequence: Synthetic oligonucleotide
gagggacttgcaggggcaga

SEQ ID NO: 6840 - DNA, 20 bp, Artificial Sequence
  Description of Artificial Sequence: Synthetic oligonucleotide
agggacttgcaggggcagaa

SEQ ID NO: 6841 - DNA, 20 bp, Artificial Sequence
  Description of Artificial Sequence: Synthetic oligonucleotide
gggacttgcaggggcagaag

SEQ ID NO: 6842 - DNA, 20 bp, Artificial Sequence
  Description of Artificial Sequence: Synthetic oligonucleotide
ggacttgcaggggcagaagg

SEQ ID NO: 6843 - DNA, 20 bp, Artificial Sequence
  Description of Artificial Sequence: Synthetic oligonucleotide
gacttgcaggggcagaaggc

SEQ ID NO: 6844 - DNA, 20 bp, Artificial Sequence
  Description of Artificial Sequence: Synthetic oligonucleotide
acttgcaggggcagaaggca

SEQ ID NO: 6845 - DNA, 20 bp, Artificial Sequence
  Description of Artificial Sequence: Synthetic oligonucleotide
cttgcaggggcagaaggcag

SEQ ID NO: 6846 - DNA, 20 bp, Artificial Sequence
  Description of Artificial Sequence: Synthetic oligonucleotide
ttgcaggggcagaaggcagg

SEQ ID NO: 6847 - DNA, 20 bp, Artificial Sequence
  Description of Artificial Sequence: Synthetic oligonucleotide
tgcaggggcagaaggcagga

SEQ ID NO: 6848 - DNA, 20 bp, Artificial Sequence
  Description of Artificial Sequence: Synthetic oligonucleotide
gcaggggcagaaggcaggag

SEQ ID NO: 6849 - DNA, 20 bp, Artificial Sequence
  Description of Artificial Sequence: Synthetic oligonucleotide
caggggcagaaggcaggagc

SEQ ID NO: 6850 - DNA, 20 bp, Artificial Sequence
  Description of Artificial Sequence: Synthetic oligonucleotide
aggggcagaaggcaggagca

SEQ ID NO: 6851 - DNA, 20 bp, Artificial Sequence
  Description of Artificial Sequence: Synthetic oligonucleotide
ggggcagaaggcaggagcaa

SEQ ID NO: 6852 - DNA, 20 bp, Artificial Sequence
  Description of Artificial Sequence: Synthetic oligonucleotide
gggcagaaggcaggagcaag

SEQ ID NO: 6853 - DNA, 20 bp, Artificial Sequence
  Description of Artificial Sequence: Synthetic oligonucleotide
ggcagaaggcaggagcaaga

SEQ ID NO: 6854 - DNA, 20 bp, Artificial Sequence
  Description of Artificial Sequence: Synthetic oligonucleotide
gcagaaggcaggagcaagag

SEQ ID NO: 6855 - DNA, 20 bp, Artificial Sequence
  Description of Artificial Sequence: Synthetic oligonucleotide
cagaaggcaggagcaagagg

SEQ ID NO: 6856 - DNA, 20 bp, Artificial Sequence
  Description of Artificial Sequence: Synthetic oligonucleotide
agaaggcaggagcaagaggg

SEQ ID NO: 6857 - DNA, 20 bp, Artificial Sequence
  Description of Artificial Sequence: Synthetic oligonucleotide
gaaggcaggagcaagagggc

SEQ ID NO: 6858 - DNA, 20 bp, Artificial Sequence
  Description of Artificial Sequence: Synthetic oligonucleotide
aaggcaggagcaagagggca

SEQ ID NO: 6859 - DNA, 20 bp, Artificial Sequence
  Description of Artificial Sequence: Synthetic oligonucleotide
aggcaggagcaagagggcag

SEQ ID NO: 6860 - DNA, 20 bp, Artificial Sequence
  Description of Artificial Sequence: Synthetic oligonucleotide
ggcaggagcaagagggcagg

SEQ ID NO: 6861 - DNA, 20 bp, Artificial Sequence
  Description of Artificial Sequence: Synthetic oligonucleotide
gcaggagcaagagggcaggc

SEQ ID NO: 6862 - DNA, 20 bp, Artificial Sequence
  Description of Artificial Sequence: Synthetic oligonucleotide
caggagcaagagggcaggct

SEQ ID NO: 6863 - DNA, 20 bp, Artificial Sequence
  Description of Artificial Sequence: Synthetic oligonucleotide
aggagcaagagggcaggctt

SEQ ID NO: 6864 - DNA, 20 bp, Artificial Sequence
  Description of Artificial Sequence: Synthetic oligonucleotide
ggagcaagagggcaggcttc

SEQ ID NO: 6865 - DNA, 20 bp, Artificial Sequence
  Description of Artificial Sequence: Synthetic oligonucleotide
gagcaagagggcaggcttcc

SEQ ID NO: 6866 - DNA, 20 bp, Artificial Sequence
  Description of Artificial Sequence: Synthetic oligonucleotide
agcaagagggcaggcttccc

SEQ ID NO: 6867 - DNA, 20 bp, Artificial Sequence
  Description of Artificial Sequence: Synthetic oligonucleotide
gcaagagggcaggcttccca

SEQ ID NO: 6868 - DNA, 20 bp, Artificial Sequence
  Description of Artificial Sequence: Synthetic oligonucleotide
caagagggcaggcttcccaa

SEQ ID NO: 6869 - DNA, 20 bp, Artificial Sequence
  Description of Artificial Sequence: Synthetic oligonucleotide
aagagggcaggcttcccaac

SEQ ID NO: 6870 - DNA, 20 bp, Artificial Sequence
  Description of Artificial Sequence: Synthetic oligonucleotide
agagggcaggcttcccaacc

SEQ ID NO: 6871 - DNA, 20 bp, Artificial Sequence
  Description of Artificial Sequence: Synthetic oligonucleotide
gagggcaggcttcccaacct

SEQ ID NO: 6872 - DNA, 20 bp, Artificial Sequence
  Description of Artificial Sequence: Synthetic oligonucleotide
agggcaggcttcccaacctg

SEQ ID NO: 6873 - DNA, 20 bp, Artificial Sequence
  Description of Artificial Sequence: Synthetic oligonucleotide
gggcaggcttcccaacctgt

SEQ ID NO: 6874 - DNA, 20 bp, Artificial Sequence
  Description of Artificial Sequence: Synthetic oligonucleotide
ggcaggcttcccaacctgtt

SEQ ID NO: 6875 - DNA, 20 bp, Artificial Sequence
  Description of Artificial Sequence: Synthetic oligonucleotide
gcaggcttcccaacctgttc

SEQ ID NO: 6876 - DNA, 20 bp, Artificial Sequence
  Description of Artificial Sequence: Synthetic oligonucleotide
caggcttcccaacctgttcc

SEQ ID NO: 6877 - DNA, 20 bp, Artificial Sequence
  Description of Artificial Sequence: Synthetic oligonucleotide
aggcttcccaacctgttcct

SEQ ID NO: 6878 - DNA, 20 bp, Artificial Sequence
  Description of Artificial Sequence: Synthetic oligonucleotide
ggcttcccaacctgttcctg

SEQ ID NO: 6879 - DNA, 20 bp, Artificial Sequence
  Description of Artificial Sequence: Synthetic oligonucleotide
gcttcccaacctgttcctgt

SEQ ID NO: 6880 - DNA, 20 bp, Artificial Sequence
  Description of Artificial Sequence: Synthetic oligonucleotide
cttcccaacctgttcctgtc

SEQ ID NO: 6881 - DNA, 20 bp, Artificial Sequence
  Description of Artificial Sequence: Synthetic oligonucleotide
ttcccaacctgttcctgtcc

SEQ ID NO: 6882 - DNA, 20 bp, Artificial Sequence
  Description of Artificial Sequence: Synthetic oligonucleotide
tcccaacctgttcctgtccc

SEQ ID NO: 6883 - DNA, 20 bp, Artificial Sequence
  Description of Artificial Sequence: Synthetic oligonucleotide
cccaacctgttcctgtccct

SEQ ID NO: 6884 - DNA, 20 bp, Artificial Sequence
  Description of Artificial Sequence: Synthetic oligonucleotide
ccaacctgttcctgtccctg

SEQ ID NO: 6885 - DNA, 20 bp, Artificial Sequence
  Description of Artificial Sequence: Synthetic oligonucleotide
caacctgttcctgtccctgc

SEQ ID NO: 6886 - DNA, 20 bp, Artificial Sequence
  Description of Artificial Sequence: Synthetic oligonucleotide
aacctgttcctgtccctgca

SEQ ID NO: 6887 - DNA, 20 bp, Artificial Sequence
  Description of Artificial Sequence: Synthetic oligonucleotide
acctgttcctgtccctgcag

SEQ ID NO: 6888 - DNA, 20 bp, Artificial Sequence
  Description of Artificial Sequence: Synthetic oligonucleotide
cctgttcctgtccctgcaga

SEQ ID NO: 6889 - DNA, 20 bp, Artificial Sequence
  Description of Artificial Sequence: Synthetic oligonucleotide
ctgttcctgtccctgcagag

SEQ ID NO: 6890 - DNA, 20 bp, Artificial Sequence
  Description of Artificial Sequence: Synthetic oligonucleotide
tgttcctgtccctgcagagc

SEQ ID NO: 6891 - DNA, 20 bp, Artificial Sequence
  Description of Artificial Sequence: Synthetic oligonucleotide
gttcctgtccctgcagagcc

SEQ ID NO: 6892 - DNA, 20 bp, Artificial Sequence
  Description of Artificial Sequence: Synthetic oligonucleotide
ttcctgtccctgcagagcca

SEQ ID NO: 6893 - DNA, 20 bp, Artificial Sequence
  Description of Artificial Sequence: Synthetic oligonucleotide
tcctgtccctgcagagccag

SEQ ID NO: 6894 - DNA, 20 bp, Artificial Sequence
  Description of Artificial Sequence: Synthetic oligonucleotide
cctgtccctgcagagccagt

SEQ ID NO: 6895 - DNA, 20 bp, Artificial Sequence
  Description of Artificial Sequence: Synthetic oligonucleotide
ctgtccctgcagagccagta

SEQ ID NO: 6896 - DNA, 20 bp, Artificial Sequence
  Description of Artificial Sequence: Synthetic oligonucleotide
tgtccctgcagagccagtag

SEQ ID NO: 6897 - DNA, 20 bp, Artificial Sequence
  Description of Artificial Sequence: Synthetic oligonucleotide
gtccctgcagagccagtaga

SEQ ID NO: 6898 - DNA, 20 bp, Artificial Sequence
  Description of Artificial Sequence: Synthetic oligonucleotide
tccctgcagagccagtagat

SEQ ID NO: 6899 - DNA, 20 bp, Artificial Sequence
  Description of Artificial Sequence: Synthetic oligonucleotide
ccctgcagagccagtagatg

SEQ ID NO: 6900 - DNA, 20 bp, Artificial Sequence
  Description of Artificial Sequence: Synthetic oligonucleotide
cctgcagagccagtagatgt

SEQ ID NO: 6901 - DNA, 20 bp, Artificial Sequence
  Description of Artificial Sequence: Synthetic oligonucleotide
ctgcagagccagtagatgtg

SEQ ID NO: 6902 - DNA, 20 bp, Artificial Sequence
  Description of Artificial Sequence: Synthetic oligonucleotide
tgcagagccagtagatgtgt

SEQ ID NO: 6903 - DNA, 20 bp, Artificial Sequence
  Description of Artificial Sequence: Synthetic oligonucleotide
gcagagccagtagatgtgtg

SEQ ID NO: 6904 - DNA, 20 bp, Artificial Sequence
  Description of Artificial Sequence: Synthetic oligonucleotide
cagagccagtagatgtgtgc

SEQ ID NO: 6905 - DNA, 20 bp, Artificial Sequence
  Description of Artificial Sequence: Synthetic oligonucleotide
agagccagtagatgtgtgca

SEQ ID NO: 6906 - DNA, 20 bp, Artificial Sequence
  Description of Artificial Sequence: Synthetic oligonucleotide
gagccagtagatgtgtgcac

SEQ ID NO: 6907 - DNA, 20 bp, Artificial Sequence
  Description of Artificial Sequence: Synthetic oligonucleotide
agccagtagatgtgtgcact

SEQ ID NO: 6908 - DNA, 20 bp, Artificial Sequence
  Description of Artificial Sequence: Synthetic oligonucleotide
gccagtagatgtgtgcactc

SEQ ID NO: 6909 - DNA, 20 bp, Artificial Sequence
  Description of Artificial Sequence: Synthetic oligonucleotide
ccagtagatgtgtgcactcc

SEQ ID NO: 6910 - DNA, 20 bp, Artificial Sequence
  Description of Artificial Sequence: Synthetic oligonucleotide
cagtagatgtgtgcactccc

SEQ ID NO: 6911 - DNA, 20 bp, Artificial Sequence
  Description of Artificial Sequence: Synthetic oligonucleotide
agtagatgtgtgcactcccg

SEQ ID NO: 6912 - DNA, 20 bp, Artificial Sequence
  Description of Artificial Sequence: Synthetic oligonucleotide
gtagatgtgtgcactcccgc

SEQ ID NO: 6913 - DNA, 20 bp, Artificial Sequence
  Description of Artificial Sequence: Synthetic oligonucleotide
tagatgtgtgcactcccgca

SEQ ID NO: 6914 - DNA, 20 bp, Artificial Sequence
  Description of Artificial Sequence: Synthetic oligonucleotide
agatgtgtgcactcccgcag

SEQ ID NO: 6915 - DNA, 20 bp, Artificial Sequence
  Description of Artificial Sequence: Synthetic oligonucleotide
gatgtgtgcactcccgcagt

SEQ ID NO: 6916 - DNA, 20 bp, Artificial Sequence
  Description of Artificial Sequence: Synthetic oligonucleotide
atgtgtgcactcccgcagtc

SEQ ID NO: 6917 - DNA, 20 bp, Artificial Sequence
  Description of Artificial Sequence: Synthetic oligonucleotide
tgtgtgcactcccgcagtca

SEQ ID NO: 6918 - DNA, 20 bp, Artificial Sequence
  Description of Artificial Sequence: Synthetic oligonucleotide
gtgtgcactcccgcagtcac

SEQ ID NO: 6919 - DNA, 20 bp, Artificial Sequence
  Description of Artificial Sequence: Synthetic oligonucleotide
tgtgcactcccgcagtcaca

SEQ ID NO: 6920 - DNA, 20 bp, Artificial Sequence
  Description of Artificial Sequence: Synthetic oligonucleotide
gtgcactcccgcagtcacac

SEQ ID NO: 6921 - DNA, 20 bp, Artificial Sequence
  Description of Artificial Sequence: Synthetic oligonucleotide
tgcactcccgcagtcacact

SEQ ID NO: 6922 - DNA, 20 bp, Artificial Sequence
  Description of Artificial Sequence: Synthetic oligonucleotide
gcactcccgcagtcacactg

SEQ ID NO: 6923 - DNA, 20 bp, Artificial Sequence
  Description of Artificial Sequence: Synthetic oligonucleotide
cactcccgcagtcacactgg

SEQ ID NO: 6924 - DNA, 20 bp, Artificial Sequence
  Description of Artificial Sequence: Synthetic oligonucleotide
actcccgcagtcacactggc

SEQ ID NO: 6925 - DNA, 20 bp, Artificial Sequence
  Description of Artificial Sequence: Synthetic oligonucleotide
ctcccgcagtcacactggct

SEQ ID NO: 6926 - DNA, 20 bp, Artificial Sequence
  Description of Artificial Sequence: Synthetic oligonucleotide
tcccgcagtcacactggctc

SEQ ID NO: 6927 - DNA, 20 bp, Artificial Sequence
  Description of Artificial Sequence: Synthetic oligonucleotide
cccgcagtcacactggctca

SEQ ID NO: 6928 - DNA, 20 bp, Artificial Sequence
  Description of Artificial Sequence: Synthetic oligonucleotide
ccgcagtcacactggctcac

SEQ ID NO: 6929 - DNA, 20 bp, Artificial Sequence
  Description of Artificial Sequence: Synthetic oligonucleotide
cgcagtcacactggctcact

SEQ ID NO: 6930 - DNA, 20 bp, Artificial Sequence
  Description of Artificial Sequence: Synthetic oligonucleotide
gcagtcacactggctcactc

SEQ ID NO: 6931 - DNA, 20 bp, Artificial Sequence
  Description of Artificial Sequence: Synthetic oligonucleotide
cagtcacactggctcactcg

SEQ ID NO: 6932 - DNA, 20 bp, Artificial Sequence
  Description of Artificial Sequence: Synthetic oligonucleotide
agtcacactggctcactcgg

SEQ ID NO: 6933 - DNA, 20 bp, Artificial Sequence
  Description of Artificial Sequence: Synthetic oligonucleotide
gtcacactggctcactcggg

SEQ ID NO: 6934 - DNA, 20 bp, Artificial Sequence
  Description of Artificial Sequence: Synthetic oligonucleotide
tcacactggctcactcgggc

SEQ ID NO: 6935 - DNA, 20 bp, Artificial Sequence
  Description of Artificial Sequence: Synthetic oligonucleotide
cacactggctcactcgggca

SEQ ID NO: 6936 - DNA, 20 bp, Artificial Sequence
  Description of Artificial Sequence: Synthetic oligonucleotide
acactggctcactcgggcag

SEQ ID NO: 6937 - DNA, 20 bp, Artificial Sequence
  Description of Artificial Sequence: Synthetic oligonucleotide
cactggctcactcgggcagt

SEQ ID NO: 6938 - DNA, 20 bp, Artificial Sequence
  Description of Artificial Sequence: Synthetic oligonucleotide
actggctcactcgggcagtg

SEQ ID NO: 6939 - DNA, 20 bp, Artificial Sequence
  Description of Artificial Sequence: Synthetic oligonucleotide
ctggctcactcgggcagtga

SEQ ID NO: 6940 - DNA, 20 bp, Artificial Sequence
  Description of Artificial Sequence: Synthetic oligonucleotide
tggctcactcgggcagtgat

SEQ ID NO: 6941 - DNA, 20 bp, Artificial Sequence
  Description of Artificial Sequence: Synthetic oligonucleotide
ggctcactcgggcagtgatg

SEQ ID NO: 6942 - DNA, 20 bp, Artificial Sequence
  Description of Artificial Sequence: Synthetic oligonucleotide
gctcactcgggcagtgatgc

SEQ ID NO: 6943 - DNA, 20 bp, Artificial Sequence
  Description of Artificial Sequence: Synthetic oligonucleotide
ctcactcgggcagtgatgct

SEQ ID NO: 6944 - DNA, 20 bp, Artificial Sequence
  Description of Artificial Sequence: Synthetic oligonucleotide
tcactcgggcagtgatgctg

SEQ ID NO: 6945 - DNA, 20 bp, Artificial Sequence
  Description of Artificial Sequence: Synthetic oligonucleotide
cactcgggcagtgatgctgc

SEQ ID NO: 6946 - DNA, 20 bp, Artificial Sequence
  Description of Artificial Sequence: Synthetic oligonucleotide
actcgggcagtgatgctgcc

SEQ ID NO: 6947 - DNA, 20 bp, Artificial Sequence
  Description of Artificial Sequence: Synthetic oligonucleotide
ctcgggcagtgatgctgccc

SEQ ID NO: 6948 - DNA, 20 bp, Artificial Sequence
  Description of Artificial Sequence: Synthetic oligonucleotide
tcgggcagtgatgctgcccc

SEQ ID NO: 6949 - DNA, 20 bp, Artificial Sequence
  Description of Artificial Sequence: Synthetic oligonucleotide
cgggcagtgatgctgcccca

SEQ ID NO: 6950 - DNA, 20 bp, Artificial Sequence
  Description of Artificial Sequence: Synthetic oligonucleotide
gggcagtgatgctgccccac

SEQ ID NO: 6951 - DNA, 20 bp, Artificial Sequence
  Description of Artificial Sequence: Synthetic oligonucleotide
ggcagtgatgctgccccact

SEQ ID NO: 6952 - DNA, 20 bp, Artificial Sequence
  Description of Artificial Sequence: Synthetic oligonucleotide
gcagtgatgctgccccactg

SEQ ID NO: 6953 - DNA, 20 bp, Artificial Sequence
  Description of Artificial Sequence: Synthetic oligonucleotide
cagtgatgctgccccactgc

SEQ ID NO: 6954 - DNA, 20 bp, Artificial Sequence
  Description of Artificial Sequence: Synthetic oligonucleotide
agtgatgctgccccactgct

SEQ ID NO: 6955 - DNA, 20 bp, Artificial Sequence
  Description of Artificial Sequence: Synthetic oligonucleotide
gtgatgctgccccactgctg

SEQ ID NO: 6956 - DNA, 20 bp, Artificial Sequence
  Description of Artificial Sequence: Synthetic oligonucleotide
tgatgctgccccactgctgg

SEQ ID NO: 6957 - DNA, 20 bp, Artificial Sequence
  Description of Artificial Sequence: Synthetic oligonucleotide
gatgctgccccactgctggt

SEQ ID NO: 6958 - DNA, 20 bp, Artificial Sequence
  Description of Artificial Sequence: Synthetic oligonucleotide
atgctgccccactgctggtg

SEQ ID NO: 6959 - DNA, 20 bp, Artificial Sequence
  Description of Artificial Sequence: Synthetic oligonucleotide
tgctgccccactgctggtga

SEQ ID NO: 6960 - DNA, 20 bp, Artificial Sequence
  Description of Artificial Sequence: Synthetic oligonucleotide
gctgccccactgctggtgag

SEQ ID NO: 6961 - DNA, 20 bp, Artificial Sequence
  Description of Artificial Sequence: Synthetic oligonucleotide
ctgccccactgctggtgagc

SEQ ID NO: 6962 - DNA, 20 bp, Artificial Sequence
  Description of Artificial Sequence: Synthetic oligonucleotide
tgccccactgctggtgagct

SEQ ID NO: 6963 - DNA, 20 bp, Artificial Sequence
  Description of Artificial Sequence: Synthetic oligonucleotide
gccccactgctggtgagctg

SEQ ID NO: 6964 - DNA, 20 bp, Artificial Sequence
  Description of Artificial Sequence: Synthetic oligonucleotide
ccccactgctggtgagctgg

SEQ ID NO: 6965 - DNA, 20 bp, Artificial Sequence
  Description of Artificial Sequence: Synthetic oligonucleotide
cccactgctggtgagctggg

SEQ ID NO: 6966 - DNA, 20 bp, Artificial Sequence
  Description of Artificial Sequence: Synthetic oligonucleotide
ccactgctggtgagctgggg

SEQ ID NO: 6967 - DNA, 20 bp, Artificial Sequence
  Description of Artificial Sequence: Synthetic oligonucleotide
cactgctggtgagctggggt

SEQ ID NO: 6968 - DNA, 20 bp, Artificial Sequence
  Description of Artificial Sequence: Synthetic oligonucleotide
actgctggtgagctggggtg

SEQ ID NO: 6969 - DNA, 20 bp, Artificial Sequence
  Description of Artificial Sequence: Synthetic oligonucleotide
ctgctggtgagctggggtgg

SEQ ID NO: 6970 - DNA, 20 bp, Artificial Sequence
  Description of Artificial Sequence: Synthetic oligonucleotide
tgctggtgagctggggtggg

SEQ ID NO: 6971 - DNA, 20 bp, Artificial Sequence
  Description of Artificial Sequence: Synthetic oligonucleotide
gctggtgagctggggtgggt

SEQ ID NO: 6972 - DNA, 20 bp, Artificial Sequence
  Description of Artificial Sequence: Synthetic oligonucleotide
ctggtgagctggggtgggtg

SEQ ID NO: 6973 - DNA, 20 bp, Artificial Sequence
  Description of Artificial Sequence: Synthetic oligonucleotide
tggtgagctggggtgggtgg

SEQ ID NO: 6974 - DNA, 20 bp, Artificial Sequence
  Description of Artificial Sequence: Synthetic oligonucleotide
ggtgagctggggtgggtggt

SEQ ID NO: 6975 - DNA, 20 bp, Artificial Sequence
  Description of Artificial Sequence: Synthetic oligonucleotide
gtgagctggggtgggtggtg

SEQ ID NO: 6976 - DNA, 20 bp, Artificial Sequence
  Description of Artificial Sequence: Synthetic oligonucleotide
tgagctggggtgggtggtgc

SEQ ID NO: 6977 - DNA, 20 bp, Artificial Sequence
  Description of Artificial Sequence: Synthetic oligonucleotide
gagctggggtgggtggtgca

SEQ ID NO: 6978 - DNA, 20 bp, Artificial Sequence
  Description of Artificial Sequence: Synthetic oligonucleotide
agctggggtgggtggtgcat

SEQ ID NO: 6979 - DNA, 20 bp, Artificial Sequence
  Description of Artificial Sequence: Synthetic oligonucleotide
gctggggtgggtggtgcatt

SEQ ID NO: 6980 - DNA, 20 bp, Artificial Sequence
  Description of Artificial Sequence: Synthetic oligonucleotide
ctggggtgggtggtgcattg

SEQ ID NO: 6981 - DNA, 20 bp, Artificial Sequence
  Description of Artificial Sequence: Synthetic oligonucleotide
tggggtgggtggtgcattgc

SEQ ID NO: 6982 - DNA, 20 bp, Artificial Sequence
  Description of Artificial Sequence: Synthetic oligonucleotide
ggggtgggtggtgcattgct

SEQ ID NO: 6983 - DNA, 20 bp, Artificial Sequence
  Description of Artificial Sequence: Synthetic oligonucleotide
gggtgggtggtgcattgctc

SEQ ID NO: 6984 - DNA, 20 bp, Artificial Sequence
  Description of Artificial Sequence: Synthetic oligonucleotide
ggtgggtggtgcattgctct

SEQ ID NO: 6985 - DNA, 20 bp, Artificial Sequence
  Description of Artificial Sequence: Synthetic oligonucleotide
gtgggtggtgcattgctctg

SEQ ID NO: 6986 - DNA, 20 bp, Artificial Sequence
  Description of Artificial Sequence: Synthetic oligonucleotide
tgggtggtgcattgctctgg

SEQ ID NO: 6987 - DNA, 20 bp, Artificial Sequence
  Description of Artificial Sequence: Synthetic oligonucleotide
gggtggtgcattgctctgga

SEQ ID NO: 6988 - DNA, 20 bp, Artificial Sequence
  Description of Artificial Sequence: Synthetic oligonucleotide
ggtggtgcattgctctggaa

SEQ ID NO: 6989 - DNA, 20 bp, Artificial Sequence
  Description of Artificial Sequence: Synthetic oligonucleotide
gtggtgcattgctctggaag

SEQ ID NO: 6990 - DNA, 20 bp, Artificial Sequence
  Description of Artificial Sequence: Synthetic oligonucleotide
tggtgcattgctctggaaga

SEQ ID NO: 6991 - DNA, 20 bp, Artificial Sequence
  Description of Artificial Sequence: Synthetic oligonucleotide
ggtgcattgctctggaagaa

SEQ ID NO: 6992 - DNA, 20 bp, Artificial Sequence
  Description of Artificial Sequence: Synthetic oligonucleotide
gtgcattgctctggaagaac

SEQ ID NO: 6993 - DNA, 20 bp, Artificial Sequence
  Description of Artificial Sequence: Synthetic oligonucleotide
tgcattgctctggaagaacg

SEQ ID NO: 6994 - DNA, 20 bp, Artificial Sequence
  Description of Artificial Sequence: Synthetic oligonucleotide
gcattgctctggaagaacga

SEQ ID NO: 6995 - DNA, 20 bp, Artificial Sequence
  Description of Artificial Sequence: Synthetic oligonucleotide
cattgctctggaagaacgat

SEQ ID NO: 6996 - DNA, 20 bp, Artificial Sequence
  Description of Artificial Sequence: Synthetic oligonucleotide
attgctctggaagaacgatg

SEQ ID NO: 6997 - DNA, 20 bp, Artificial Sequence
  Description of Artificial Sequence: Synthetic oligonucleotide
ttgctctggaagaacgatgc

SEQ ID NO: 6998 - DNA, 20 bp, Artificial Sequence
  Description of Artificial Sequence: Synthetic oligonucleotide
tgctctggaagaacgatgca

SEQ ID NO: 6999 - DNA, 20 bp, Artificial Sequence
  Description of Artificial Sequence: Synthetic oligonucleotide
gctctggaagaacgatgcaa

SEQ ID NO: 7000 - DNA, 20 bp, Artificial Sequence
  Description of Artificial Sequence: Synthetic oligonucleotide
ctctggaagaacgatgcaaa

SEQ ID NO: 7001 - DNA, 20 bp, Artificial Sequence
  Description of Artificial Sequence: Synthetic oligonucleotide
tctggaagaacgatgcaaat

SEQ ID NO: 7002 - DNA, 20 bp, Artificial Sequence
  Description of Artificial Sequence: Synthetic oligonucleotide
ctggaagaacgatgcaaatt

SEQ ID NO: 7003 - DNA, 20 bp, Artificial Sequence
  Description of Artificial Sequence: Synthetic oligonucleotide
tggaagaacgatgcaaattg

SEQ ID NO: 7004 - DNA, 20 bp, Artificial Sequence
  Description of Artificial Sequence: Synthetic oligonucleotide
ggaagaacgatgcaaattgg

SEQ ID NO: 7005 - DNA, 20 bp, Artificial Sequence
  Description of Artificial Sequence: Synthetic oligonucleotide
gaagaacgatgcaaattggg

SEQ ID NO: 7006 - DNA, 20 bp, Artificial Sequence
  Description of Artificial Sequence: Synthetic oligonucleotide
aagaacgatgcaaattgggc

SEQ ID NO: 7007 - DNA, 20 bp, Artificial Sequence
  Description of Artificial Sequence: Synthetic oligonucleotide
agaacgatgcaaattgggcc

SEQ ID NO: 7008 - DNA, 20 bp, Artificial Sequence
  Description of Artificial Sequence: Synthetic oligonucleotide
gaacgatgcaaattgggccc

SEQ ID NO: 7009 - DNA, 20 bp, Artificial Sequence
  Description of Artificial Sequence: Synthetic oligonucleotide
aacgatgcaaattgggcccg

SEQ ID NO: 7010 - DNA, 20 bp, Artificial Sequence
  Description of Artificial Sequence: Synthetic oligonucleotide
acgatgcaaattgggcccgg

SEQ ID NO: 7011 - DNA, 20 bp, Artificial Sequence
  Description of Artificial Sequence: Synthetic oligonucleotide
cgatgcaaattgggcccggg

SEQ ID NO: 7012 - DNA, 20 bp, Artificial Sequence
  Description of Artificial Sequence: Synthetic oligonucleotide
gatgcaaattgggcccgggg

SEQ ID NO: 7013 - DNA, 20 bp, Artificial Sequence
  Description of Artificial Sequence: Synthetic oligonucleotide
atgcaaattgggcccggggg

SEQ ID NO: 7014 - DNA, 20 bp, Artificial Sequence
  Description of Artificial Sequence: Synthetic oligonucleotide
tgcaaattgggcccgggggt

SEQ ID NO: 7015 - DNA, 20 bp, Artificial Sequence
  Description of Artificial Sequence: Synthetic oligonucleotide
gcaaattgggcccgggggtg

SEQ ID NO: 7016 - DNA, 20 bp, Artificial Sequence
  Description of Artificial Sequence: Synthetic oligonucleotide
caaattgggcccgggggtga

SEQ ID NO: 7017 - DNA, 20 bp, Artificial Sequence
  Description of Artificial Sequence: Synthetic oligonucleotide
aaattgggcccgggggtgag

SEQ ID NO: 7018 - DNA, 20 bp, Artificial Sequence
  Description of Artificial Sequence: Synthetic oligonucleotide
aattgggcccgggggtgagt

SEQ ID NO: 7019 - DNA, 20 bp, Artificial Sequence
  Description of Artificial Sequence: Synthetic oligonucleotide
attgggcccgggggtgagtg

SEQ ID NO: 7020 - DNA, 20 bp, Artificial Sequence
  Description of Artificial Sequence: Synthetic oligonucleotide
ttgggcccgggggtgagtgc

SEQ ID NO: 7021 - DNA, 20 bp, Artificial Sequence
  Description of Artificial Sequence: Synthetic oligonucleotide
tgggcccgggggtgagtgca

SEQ ID NO: 7022 - DNA, 20 bp, Artificial Sequence
  Description of Artificial Sequence: Synthetic oligonucleotide
gggcccgggggtgagtgcac

SEQ ID NO: 7023 - DNA, 20 bp, Artificial Sequence
  Description of Artificial Sequence: Synthetic oligonucleotide
ggcccgggggtgagtgcaca

SEQ ID NO: 7024 - DNA, 20 bp, Artificial Sequence
  Description of Artificial Sequence: Synthetic oligonucleotide
gcccgggggtgagtgcacat

SEQ ID NO: 7025 - DNA, 20 bp, Artificial Sequence
  Description of Artificial Sequence: Synthetic oligonucleotide
cccgggggtgagtgcacatg

SEQ ID NO: 7026 - DNA, 20 bp, Artificial Sequence
  Description of Artificial Sequence: Synthetic oligonucleotide
ccgggggtgagtgcacatga

SEQ ID NO: 7027 - DNA, 20 bp, Artificial Sequence
  Description of Artificial Sequence: Synthetic oligonucleotide
cgggggtgagtgcacatgaa

SEQ ID NO: 7028 - DNA, 20 bp, Artificial Sequence
  Description of Artificial Sequence: Synthetic oligonucleotide
gggggtgagtgcacatgaag

SEQ ID NO: 7029 - DNA, 20 bp, Artificial Sequence
  Description of Artificial Sequence: Synthetic oligonucleotide
ggggtgagtgcacatgaagc

SEQ ID NO: 7030 - DNA, 20 bp, Artificial Sequence
  Description of Artificial Sequence: Synthetic oligonucleotide
gggtgagtgcacatgaagct

SEQ ID NO: 7031 - DNA, 20 bp, Artificial Sequence
  Description of Artificial Sequence: Synthetic oligonucleotide
ggtgagtgcacatgaagctt

SEQ ID NO: 7032 - DNA, 20 bp, Artificial Sequence
  Description of Artificial Sequence: Synthetic oligonucleotide
gtgagtgcacatgaagcttg

SEQ ID NO: 7033 - DNA, 20 bp, Artificial Sequence
  Description of Artificial Sequence: Synthetic oligonucleotide
tgagtgcacatgaagcttgg

SEQ ID NO: 7034 - DNA, 20 bp, Artificial Sequence
  Description of Artificial Sequence: Synthetic oligonucleotide
gagtgcacatgaagcttgga

SEQ ID NO: 7035 - DNA, 20 bp, Artificial Sequence
  Description of Artificial Sequence: Synthetic oligonucleotide
agtgcacatgaagcttggag

SEQ ID NO: 7036 - DNA, 20 bp, Artificial Sequence
  Description of Artificial Sequence: Synthetic oligonucleotide
gtgcacatgaagcttggagg

SEQ ID NO: 7037 - DNA, 20 bp, Artificial Sequence
  Description of Artificial Sequence: Synthetic oligonucleotide
tgcacatgaagcttggaggg

SEQ ID NO: 7038 - DNA, 20 bp, Artificial Sequence
  Description of Artificial Sequence: Synthetic oligonucleotide
gcacatgaagcttggaggga

SEQ ID NO: 7039 - DNA, 20 bp, Artificial Sequence
  Description of Artificial Sequence: Synthetic oligonucleotide
cacatgaagcttggagggaa

SEQ ID NO: 7040 - DNA, 20 bp, Artificial Sequence
  Description of Artificial Sequence: Synthetic oligonucleotide
acatgaagcttggagggaaa

SEQ ID NO: 7041 - DNA, 20 bp, Artificial Sequence
  Description of Artificial Sequence: Synthetic oligonucleotide
catgaagcttggagggaaaa

SEQ ID NO: 7042 - DNA, 20 bp, Artificial Sequence
  Description of Artificial Sequence: Synthetic oligonucleotide
atgaagcttggagggaaaaa

SEQ ID NO: 7043 - DNA, 20 bp, Artificial Sequence
  Description of Artificial Sequence: Synthetic oligonucleotide
tgaagcttggagggaaaaat

SEQ ID NO: 7044 - DNA, 20 bp, Artificial Sequence
  Description of Artificial Sequence: Synthetic oligonucleotide
gaagcttggagggaaaaatc

SEQ ID NO: 7045 - DNA, 20 bp, Artificial Sequence
  Description of Artificial Sequence: Synthetic oligonucleotide
aagcttggagggaaaaatcc

SEQ ID NO: 7046 - DNA, 20 bp, Artificial Sequence
  Description of Artificial Sequence: Synthetic oligonucleotide
agcttggagggaaaaatcca

SEQ ID NO: 7047 - DNA, 20 bp, Artificial Sequence
  Description of Artificial Sequence: Synthetic oligonucleotide
gcttggagggaaaaatccag

SEQ ID NO: 7048 - DNA, 20 bp, Artificial Sequence
  Description of Artificial Sequence: Synthetic oligonucleotide
cttggagggaaaaatccaga

SEQ ID NO: 7049 - DNA, 20 bp, Artificial Sequence
  Description of Artificial Sequence: Synthetic oligonucleotide
ttggagggaaaaatccagat

SEQ ID NO: 7050 - DNA, 20 bp, Artificial Sequence
  Description of Artificial Sequence: Synthetic oligonucleotide
tggagggaaaaatccagata

SEQ ID NO: 7051 - DNA, 20 bp, Artificial Sequence
  Description of Artificial Sequence: Synthetic oligonucleotide
ggagggaaaaatccagatac

SEQ ID NO: 7052 - DNA, 20 bp, Artificial Sequence
  Description of Artificial Sequence: Synthetic oligonucleotide
gagggaaaaatccagatact

SEQ ID NO: 7053 - DNA, 20 bp, Artificial Sequence
  Description of Artificial Sequence: Synthetic oligonucleotide
agggaaaaatccagatactt

SEQ ID NO: 7054 - DNA, 20 bp, Artificial Sequence
  Description of Artificial Sequence: Synthetic oligonucleotide
gggaaaaatccagatacttt

SEQ ID NO: 7055 - DNA, 20 bp, Artificial Sequence
  Description of Artificial Sequence: Synthetic oligonucleotide
ggaaaaatccagatactttt

SEQ ID NO: 7056 - DNA, 20 bp, Artificial Sequence
  Description of Artificial Sequence: Synthetic oligonucleotide
gaaaaatccagatacttttt

SEQ ID NO: 7057 - DNA, 20 bp, Artificial Sequence
  Description of Artificial Sequence: Synthetic oligonucleotide
aaaaatccagatactttttt

SEQ ID NO: 7058 - DNA, 20 bp, Artificial Sequence
  Description of Artificial Sequence: Synthetic oligonucleotide
aaaatccagatacttttttt

SEQ ID NO: 7059 - DNA, 20 bp, Artificial Sequence
  Description of Artificial Sequence: Synthetic oligonucleotide
aaatccagatactttttttt

SEQ ID NO: 7060 - DNA, 20 bp, Artificial Sequence
  Description of Artificial Sequence: Synthetic oligonucleotide
aatccagatacttttttttt

SEQ ID NO: 7061 - DNA, 20 bp, Artificial Sequence
  Description of Artificial Sequence: Synthetic oligonucleotide
atccagatactttttttttt

SEQ ID NO: 7062 - DNA, 20 bp, Artificial Sequence
  Description of Artificial Sequence: Synthetic oligonucleotide
tccagatacttttttttttt

SEQ ID NO: 7063 - DNA, 20 bp, Artificial Sequence
  Description of Artificial Sequence: Synthetic oligonucleotide
ccagatactttttttttttt

SEQ ID NO: 7064 - DNA, 20 bp, Artificial Sequence
  Description of Artificial Sequence: Synthetic oligonucleotide
cagatacttttttttttttt

SEQ ID NO: 7065 - DNA, 20 bp, Artificial Sequence
  Description of Artificial Sequence: Synthetic oligonucleotide
agatactttttttttttttg

SEQ ID NO: 7066 - DNA, 20 bp, Artificial Sequence
  Description of Artificial Sequence: Synthetic oligonucleotide
gatactttttttttttttga

SEQ ID NO: 7067 - DNA, 20 bp, Artificial Sequence
  Description of Artificial Sequence: Synthetic oligonucleotide
atactttttttttttttgaa

SEQ ID NO: 7068 - DNA, 20 bp, Artificial Sequence
  Description of Artificial Sequence: Synthetic oligonucleotide
tactttttttttttttgaag

SEQ ID NO: 7069 - DNA, 20 bp, Artificial Sequence
  Description of Artificial Sequence: Synthetic oligonucleotide
actttttttttttttgaagc

SEQ ID NO: 7070 - DNA, 20 bp, Artificial Sequence
  Description of Artificial Sequence: Synthetic oligonucleotide
ctttttttttttttgaagca

SEQ ID NO: 7071 - DNA, 20 bp, Artificial Sequence
  Description of Artificial Sequence: Synthetic oligonucleotide
tttttttttttttgaagcag

SEQ ID NO: 7072 - DNA, 20 bp, Artificial Sequence
  Description of Artificial Sequence: Synthetic oligonucleotide
ttttttttttttgaagcaga

SEQ ID NO: 7073 - DNA, 20 bp, Artificial Sequence
  Description of Artificial Sequence: Synthetic oligonucleotide
tttttttttttgaagcagaa

SEQ ID NO: 7074 - DNA, 20 bp, Artificial Sequence
  Description of Artificial Sequence: Synthetic oligonucleotide
ttttttttttgaagcagaat

SEQ ID NO: 7075 - DNA, 20 bp, Artificial Sequence
  Description of Artificial Sequence: Synthetic oligonucleotide
tttttttttgaagcagaatt

SEQ ID NO: 7076 - DNA, 20 bp, Artificial Sequence
  Description of Artificial Sequence: Synthetic oligonucleotide
ttttttttgaagcagaattt

SEQ ID NO: 7077 - DNA, 20 bp, Artificial Sequence
  Description of Artificial Sequence: Synthetic oligonucleotide
tttttttgaagcagaatttc

SEQ ID NO: 7078 - DNA, 20 bp, Artificial Sequence
  Description of Artificial Sequence: Synthetic oligonucleotide
ttttttgaagcagaatttca

SEQ ID NO: 7079 - DNA, 20 bp, Artificial Sequence
  Description of Artificial Sequence: Synthetic oligonucleotide
tttttgaagcagaatttcac

SEQ ID NO: 7080 - DNA, 20 bp, Artificial Sequence
  Description of Artificial Sequence: Synthetic oligonucleotide
ttttgaagcagaatttcact

SEQ ID NO: 7081 - DNA, 20 bp, Artificial Sequence
  Description of Artificial Sequence: Synthetic oligonucleotide
tttgaagcagaatttcactc

SEQ ID NO: 7082 - DNA, 20 bp, Artificial Sequence
  Description of Artificial Sequence: Synthetic oligonucleotide
ttgaagcagaatttcactct

SEQ ID NO: 7083 - DNA, 20 bp, Artificial Sequence
  Description of Artificial Sequence: Synthetic oligonucleotide
tgaagcagaatttcactctt

SEQ ID NO: 7084 - DNA, 20 bp, Artificial Sequence
  Description of Artificial Sequence: Synthetic oligonucleotide
gaagcagaatttcactcttg

SEQ ID NO: 7085 - DNA, 20 bp, Artificial Sequence
  Description of Artificial Sequence: Synthetic oligonucleotide
aagcagaatttcactcttgt

SEQ ID NO: 7086 - DNA, 20 bp, Artificial Sequence
  Description of Artificial Sequence: Synthetic oligonucleotide
agcagaatttcactcttgtt

SEQ ID NO: 7087 - DNA, 20 bp, Artificial Sequence
  Description of Artificial Sequence: Synthetic oligonucleotide
gcagaatttcactcttgttg

SEQ ID NO: 7088 - DNA, 20 bp, Artificial Sequence
  Description of Artificial Sequence: Synthetic oligonucleotide
cagaatttcactcttgttgc

SEQ ID NO: 7089 - DNA, 20 bp, Artificial Sequence
  Description of Artificial Sequence: Synthetic oligonucleotide
agaatttcactcttgttgcc

SEQ ID NO: 7090 - DNA, 20 bp, Artificial Sequence
  Description of Artificial Sequence: Synthetic oligonucleotide
gaatttcactcttgttgccc

SEQ ID NO: 7091 - DNA, 20 bp, Artificial Sequence
  Description of Artificial Sequence: Synthetic oligonucleotide
aatttcactcttgttgccca

SEQ ID NO: 7092 - DNA, 20 bp, Artificial Sequence
  Description of Artificial Sequence: Synthetic oligonucleotide
atttcactcttgttgcccag

SEQ ID NO: 7093 - DNA, 20 bp, Artificial Sequence
  Description of Artificial Sequence: Synthetic oligonucleotide
tttcactcttgttgcccagg

SEQ ID NO: 7094 - DNA, 20 bp, Artificial Sequence
  Description of Artificial Sequence: Synthetic oligonucleotide
ttcactcttgttgcccaggc

SEQ ID NO: 7095 - DNA, 20 bp, Artificial Sequence
  Description of Artificial Sequence: Synthetic oligonucleotide
tcactcttgttgcccaggct

SEQ ID NO: 7096 - DNA, 20 bp, Artificial Sequence
  Description of Artificial Sequence: Synthetic oligonucleotide
cactcttgttgcccaggcta

SEQ ID NO: 7097 - DNA, 20 bp, Artificial Sequence
  Description of Artificial Sequence: Synthetic oligonucleotide
actcttgttgcccaggctag

SEQ ID NO: 7098 - DNA, 20 bp, Artificial Sequence
  Description of Artificial Sequence: Synthetic oligonucleotide
ctcttgttgcccaggctaga

SEQ ID NO: 7099 - DNA, 20 bp, Artificial Sequence
  Description of Artificial Sequence: Synthetic oligonucleotide
tcttgttgcccaggctagag

SEQ ID NO: 7100 - DNA, 20 bp, Artificial Sequence
  Description of Artificial Sequence: Synthetic oligonucleotide
cttgttgcccaggctagagt

SEQ ID NO: 7101 - DNA, 20 bp, Artificial Sequence
  Description of Artificial Sequence: Synthetic oligonucleotide
ttgttgcccaggctagagta

SEQ ID NO: 7102 - DNA, 20 bp, Artificial Sequence
  Description of Artificial Sequence: Synthetic oligonucleotide
tgttgcccaggctagagtac

SEQ ID NO: 7103 - DNA, 20 bp, Artificial Sequence
  Description of Artificial Sequence: Synthetic oligonucleotide
gttgcccaggctagagtaca

SEQ ID NO: 7104 - DNA, 20 bp, Artificial Sequence
  Description of Artificial Sequence: Synthetic oligonucleotide
ttgcccaggctagagtacag

SEQ ID NO: 7105 - DNA, 20 bp, Artificial Sequence
  Description of Artificial Sequence: Synthetic oligonucleotide
tgcccaggctagagtacagt

SEQ ID NO: 7106 - DNA, 20 bp, Artificial Sequence
  Description of Artificial Sequence: Synthetic oligonucleotide
gcccaggctagagtacagtg

SEQ ID NO: 7107 - DNA, 20 bp, Artificial Sequence
  Description of Artificial Sequence: Synthetic oligonucleotide
cccaggctagagtacagtgg

SEQ ID NO: 7108 - DNA, 20 bp, Artificial Sequence
  Description of Artificial Sequence: Synthetic oligonucleotide
ccaggctagagtacagtggt

SEQ ID NO: 7109 - DNA, 20 bp, Artificial Sequence
  Description of Artificial Sequence: Synthetic oligonucleotide
caggctagagtacagtggtg

SEQ ID NO: 7110 - DNA, 20 bp, Artificial Sequence
  Description of Artificial Sequence: Synthetic oligonucleotide
aggctagagtacagtggtgc

SEQ ID NO: 7111 - DNA, 20 bp, Artificial Sequence
  Description of Artificial Sequence: Synthetic oligonucleotide
ggctagagtacagtggtgca

SEQ ID NO: 7112 - DNA, 20 bp, Artificial Sequence
  Description of Artificial Sequence: Synthetic oligonucleotide
gctagagtacagtggtgcaa

SEQ ID NO: 7113 - DNA, 20 bp, Artificial Sequence
  Description of Artificial Sequence: Synthetic oligonucleotide
ctagagtacagtggtgcaat

SEQ ID NO: 7114 - DNA, 20 bp, Artificial Sequence
  Description of Artificial Sequence: Synthetic oligonucleotide
tagagtacagtggtgcaatc

SEQ ID NO: 7115 - DNA, 20 bp, Artificial Sequence
  Description of Artificial Sequence: Synthetic oligonucleotide
agagtacagtggtgcaatct

SEQ ID NO: 7116 - DNA, 20 bp, Artificial Sequence
  Description of Artificial Sequence: Synthetic oligonucleotide
gagtacagtggtgcaatctc

SEQ ID NO: 7117 - DNA, 20 bp, Artificial Sequence
  Description of Artificial Sequence: Synthetic oligonucleotide
agtacagtggtgcaatctcg

SEQ ID NO: 7118 - DNA, 20 bp, Artificial Sequence
  Description of Artificial Sequence: Synthetic oligonucleotide
gtacagtggtgcaatctcgg

SEQ ID NO: 7119 - DNA, 20 bp, Artificial Sequence
  Description of Artificial Sequence: Synthetic oligonucleotide
tacagtggtgcaatctcggc

SEQ ID NO: 7120 - DNA, 20 bp, Artificial Sequence
  Description of Artificial Sequence: Synthetic oligonucleotide
acagtggtgcaatctcggct

SEQ ID NO: 7121 - DNA, 20 bp, Artificial Sequence
  Description of Artificial Sequence: Synthetic oligonucleotide
cagtggtgcaatctcggctc

SEQ ID NO: 7122 - DNA, 20 bp, Artificial Sequence
  Description of Artificial Sequence: Synthetic oligonucleotide
agtggtgcaatctcggctca

SEQ ID NO: 7123 - DNA, 20 bp, Artificial Sequence
  Description of Artificial Sequence: Synthetic oligonucleotide
gtggtgcaatctcggctcac

SEQ ID NO: 7124 - DNA, 20 bp, Artificial Sequence
  Description of Artificial Sequence: Synthetic oligonucleotide
tggtgcaatctcggctcact

SEQ ID NO: 7125 - DNA, 20 bp, Artificial Sequence
  Description of Artificial Sequence: Synthetic oligonucleotide
ggtgcaatctcggctcactg

SEQ ID NO: 7126 - DNA, 20 bp, Artificial Sequence
  Description of Artificial Sequence: Synthetic oligonucleotide
gtgcaatctcggctcactgc

SEQ ID NO: 7127 - DNA, 20 bp, Artificial Sequence
  Description of Artificial Sequence: Synthetic oligonucleotide
tgcaatctcggctcactgca

SEQ ID NO: 7128 - DNA, 20 bp, Artificial Sequence
  Description of Artificial Sequence: Synthetic oligonucleotide
gcaatctcggctcactgcaa

SEQ ID NO: 7129 - DNA, 20 bp, Artificial Sequence
  Description of Artificial Sequence: Synthetic oligonucleotide
caatctcggctcactgcaac

SEQ ID NO: 7130 - DNA, 20 bp, Artificial Sequence
  Description of Artificial Sequence: Synthetic oligonucleotide
aatctcggctcactgcaacc

SEQ ID NO: 7131 - DNA, 20 bp, Artificial Sequence
  Description of Artificial Sequence: Synthetic oligonucleotide
atctcggctcactgcaacct

SEQ ID NO: 7132 - DNA, 20 bp, Artificial Sequence
  Description of Artificial Sequence: Synthetic oligonucleotide
tctcggctcactgcaacctc

SEQ ID NO: 7133 - DNA, 20 bp, Artificial Sequence
  Description of Artificial Sequence: Synthetic oligonucleotide
ctcggctcactgcaacctcc

SEQ ID NO: 7134 - DNA, 20 bp, Artificial Sequence
  Description of Artificial Sequence: Synthetic oligonucleotide
tcggctcactgcaacctcca

SEQ ID NO: 7135 - DNA, 20 bp, Artificial Sequence
  Description of Artificial Sequence: Synthetic oligonucleotide
cggctcactgcaacctccac

SEQ ID NO: 7136 - DNA, 20 bp, Artificial Sequence
  Description of Artificial Sequence: Synthetic oligonucleotide
ggctcactgcaacctccacc

SEQ ID NO: 7137 - DNA, 20 bp, Artificial Sequence
  Description of Artificial Sequence: Synthetic oligonucleotide
gctcactgcaacctccacct

SEQ ID NO: 7138 - DNA, 20 bp, Artificial Sequence
  Description of Artificial Sequence: Synthetic oligonucleotide
ctcactgcaacctccacctc

SEQ ID NO: 7139 - DNA, 20 bp, Artificial Sequence
  Description of Artificial Sequence: Synthetic oligonucleotide
tcactgcaacctccacctcc

SEQ ID NO: 7140 - DNA, 20 bp, Artificial Sequence
  Description of Artificial Sequence: Synthetic oligonucleotide
cactgcaacctccacctcct

SEQ ID NO: 7141 - DNA, 20 bp, Artificial Sequence
  Description of Artificial Sequence: Synthetic oligonucleotide
actgcaacctccacctcctg

SEQ ID NO: 7142 - DNA, 20 bp, Artificial Sequence
  Description of Artificial Sequence: Synthetic oligonucleotide
ctgcaacctccacctcctga

SEQ ID NO: 7143 - DNA, 20 bp, Artificial Sequence
  Description of Artificial Sequence: Synthetic oligonucleotide
tgcaacctccacctcctgag

SEQ ID NO: 7144 - DNA, 20 bp, Artificial Sequence
  Description of Artificial Sequence: Synthetic oligonucleotide
gcaacctccacctcctgagt

SEQ ID NO: 7145 - DNA, 20 bp, Artificial Sequence
  Description of Artificial Sequence: Synthetic oligonucleotide
caacctccacctcctgagtt

SEQ ID NO: 7146 - DNA, 20 bp, Artificial Sequence
  Description of Artificial Sequence: Synthetic oligonucleotide
aacctccacctcctgagttc

SEQ ID NO: 7147 - DNA, 20 bp, Artificial Sequence
  Description of Artificial Sequence: Synthetic oligonucleotide
acctccacctcctgagttcc

SEQ ID NO: 7148 - DNA, 20 bp, Artificial Sequence
  Description of Artificial Sequence: Synthetic oligonucleotide
cctccacctcctgagttcca

SEQ ID NO: 7149 - DNA, 20 bp, Artificial Sequence
  Description of Artificial Sequence: Synthetic oligonucleotide
ctccacctcctgagttccag

SEQ ID NO: 7150 - DNA, 20 bp, Artificial Sequence
  Description of Artificial Sequence: Synthetic oligonucleotide
tccacctcctgagttccagt

SEQ ID NO: 7151 - DNA, 20 bp, Artificial Sequence
  Description of Artificial Sequence: Synthetic oligonucleotide
ccacctcctgagttccagtg

SEQ ID NO: 7152 - DNA, 20 bp, Artificial Sequence
  Description of Artificial Sequence: Synthetic oligonucleotide
cacctcctgagttccagtga

SEQ ID NO: 7153 - DNA, 20 bp, Artificial Sequence
  Description of Artificial Sequence: Synthetic oligonucleotide
acctcctgagttccagtgat

SEQ ID NO: 7154 - DNA, 20 bp, Artificial Sequence
  Description of Artificial Sequence: Synthetic oligonucleotide
cctcctgagttccagtgatt

SEQ ID NO: 7155 - DNA, 20 bp, Artificial Sequence
  Description of Artificial Sequence: Synthetic oligonucleotide
ctcctgagttccagtgattc

SEQ ID NO: 7156 - DNA, 20 bp, Artificial Sequence
  Description of Artificial Sequence: Synthetic oligonucleotide
tcctgagttccagtgattct

SEQ ID NO: 7157 - DNA, 20 bp, Artificial Sequence
  Description of Artificial Sequence: Synthetic oligonucleotide
cctgagttccagtgattctc

SEQ ID NO: 7158 - DNA, 20 bp, Artificial Sequence
  Description of Artificial Sequence: Synthetic oligonucleotide
ctgagttccagtgattctcc

SEQ ID NO: 7159 - DNA, 20 bp, Artificial Sequence
  Description of Artificial Sequence: Synthetic oligonucleotide
tgagttccagtgattctcct

SEQ ID NO: 7160 - DNA, 20 bp, Artificial Sequence
  Description of Artificial Sequence: Synthetic oligonucleotide
gagttccagtgattctcctg

SEQ ID NO: 7161 - DNA, 20 bp, Artificial Sequence
  Description of Artificial Sequence: Synthetic oligonucleotide
agttccagtgattctcctgc

SEQ ID NO: 7162 - DNA, 20 bp, Artificial Sequence
  Description of Artificial Sequence: Synthetic oligonucleotide
gttccagtgattctcctgcc

SEQ ID NO: 7163 - DNA, 20 bp, Artificial Sequence
  Description of Artificial Sequence: Synthetic oligonucleotide
ttccagtgattctcctgcct

SEQ ID NO: 7164 - DNA, 20 bp, Artificial Sequence
  Description of Artificial Sequence: Synthetic oligonucleotide
tccagtgattctcctgcctt

SEQ ID NO: 7165 - DNA, 20 bp, Artificial Sequence
  Description of Artificial Sequence: Synthetic oligonucleotide
ccagtgattctcctgccttc

SEQ ID NO: 7166 - DNA, 20 bp, Artificial Sequence
  Description of Artificial Sequence: Synthetic oligonucleotide
cagtgattctcctgccttcc

SEQ ID NO: 7167 - DNA, 20 bp, Artificial Sequence
  Description of Artificial Sequence: Synthetic oligonucleotide
agtgattctcctgccttcct

SEQ ID NO: 7168 - DNA, 20 bp, Artificial Sequence
  Description of Artificial Sequence: Synthetic oligonucleotide
gtgattctcctgccttccta

SEQ ID NO: 7169 - DNA, 20 bp, Artificial Sequence
  Description of Artificial Sequence: Synthetic oligonucleotide
tgattctcctgccttcctag

SEQ ID NO: 7170 - DNA, 20 bp, Artificial Sequence
  Description of Artificial Sequence: Synthetic oligonucleotide
gattctcctgccttcctagt

SEQ ID NO: 7171 - DNA, 20 bp, Artificial Sequence
  Description of Artificial Sequence: Synthetic oligonucleotide
attctcctgccttcctagta

SEQ ID NO: 7172 - DNA, 20 bp, Artificial Sequence
  Description of Artificial Sequence: Synthetic oligonucleotide
ttctcctgccttcctagtag

SEQ ID NO: 7173 - DNA, 20 bp, Artificial Sequence
  Description of Artificial Sequence: Synthetic oligonucleotide
tctcctgccttcctagtagc

SEQ ID NO: 7174 - DNA, 20 bp, Artificial Sequence
  Description of Artificial Sequence: Synthetic oligonucleotide
ctcctgccttcctagtagct

SEQ ID NO: 7175 - DNA, 20 bp, Artificial Sequence
  Description of Artificial Sequence: Synthetic oligonucleotide
tcctgccttcctagtagctg

SEQ ID NO: 7176 - DNA, 20 bp, Artificial Sequence
  Description of Artificial Sequence: Synthetic oligonucleotide
cctgccttcctagtagctgg

SEQ ID NO: 7177 - DNA, 20 bp, Artificial Sequence
  Description of Artificial Sequence: Synthetic oligonucleotide
ctgccttcctagtagctggg

SEQ ID NO: 7178 - DNA, 20 bp, Artificial Sequence
  Description of Artificial Sequence: Synthetic oligonucleotide
tgccttcctagtagctggga

SEQ ID NO: 7179 - DNA, 20 bp, Artificial Sequence
  Description of Artificial Sequence: Synthetic oligonucleotide
gccttcctagtagctgggac

SEQ ID NO: 7180 - DNA, 20 bp, Artificial Sequence
  Description of Artificial Sequence: Synthetic oligonucleotide
ccttcctagtagctgggacc

SEQ ID NO: 7181 - DNA, 20 bp, Artificial Sequence
  Description of Artificial Sequence: Synthetic oligonucleotide
cttcctagtagctgggacca

SEQ ID NO: 7182 - DNA, 20 bp, Artificial Sequence
  Description of Artificial Sequence: Synthetic oligonucleotide
ttcctagtagctgggaccag

SEQ ID NO: 7183 - DNA, 20 bp, Artificial Sequence
  Description of Artificial Sequence: Synthetic oligonucleotide
tcctagtagctgggaccaga

SEQ ID NO: 7184 - DNA, 20 bp, Artificial Sequence
  Description of Artificial Sequence: Synthetic oligonucleotide
cctagtagctgggaccagag

SEQ ID NO: 7185 - DNA, 20 bp, Artificial Sequence
  Description of Artificial Sequence: Synthetic oligonucleotide
ctagtagctgggaccagagt

SEQ ID NO: 7186 - DNA, 20 bp, Artificial Sequence
  Description of Artificial Sequence: Synthetic oligonucleotide
tagtagctgggaccagagtg

SEQ ID NO: 7187 - DNA, 20 bp, Artificial Sequence
  Description of Artificial Sequence: Synthetic oligonucleotide
agtagctgggaccagagtgc

SEQ ID NO: 7188 - DNA, 20 bp, Artificial Sequence
  Description of Artificial Sequence: Synthetic oligonucleotide
gtagctgggaccagagtgcc

SEQ ID NO: 7189 - DNA, 20 bp, Artificial Sequence
  Description of Artificial Sequence: Synthetic oligonucleotide
tagctgggaccagagtgcct

SEQ ID NO: 7190 - DNA, 20 bp, Artificial Sequence
  Description of Artificial Sequence: Synthetic oligonucleotide
agctgggaccagagtgcctg

SEQ ID NO: 7191 - DNA, 20 bp, Artificial Sequence
  Description of Artificial Sequence: Synthetic oligonucleotide
gctgggaccagagtgcctgt

SEQ ID NO: 7192 - DNA, 20 bp, Artificial Sequence
  Description of Artificial Sequence: Synthetic oligonucleotide
ctgggaccagagtgcctgtc

SEQ ID NO: 7193 - DNA, 20 bp, Artificial Sequence
  Description of Artificial Sequence: Synthetic oligonucleotide
tgggaccagagtgcctgtca

SEQ ID NO: 7194 - DNA, 20 bp, Artificial Sequence
  Description of Artificial Sequence: Synthetic oligonucleotide
gggaccagagtgcctgtcac

SEQ ID NO: 7195 - DNA, 20 bp, Artificial Sequence
  Description of Artificial Sequence: Synthetic oligonucleotide
ggaccagagtgcctgtcacc

SEQ ID NO: 7196 - DNA, 20 bp, Artificial Sequence
  Description of Artificial Sequence: Synthetic oligonucleotide
gaccagagtgcctgtcacca

SEQ ID NO: 7197 - DNA, 20 bp, Artificial Sequence
  Description of Artificial Sequence: Synthetic oligonucleotide
accagagtgcctgtcaccac

SEQ ID NO: 7198 - DNA, 20 bp, Artificial Sequence
  Description of Artificial Sequence: Synthetic oligonucleotide
ccagagtgcctgtcaccaca

SEQ ID NO: 7199 - DNA, 20 bp, Artificial Sequence
  Description of Artificial Sequence: Synthetic oligonucleotide
cagagtgcctgtcaccacac

SEQ ID NO: 7200 - DNA, 20 bp, Artificial Sequence
  Description of Artificial Sequence: Synthetic oligonucleotide
agagtgcctgtcaccacact

SEQ ID NO: 7201 - DNA, 20 bp, Artificial Sequence
  Description of Artificial Sequence: Synthetic oligonucleotide
gagtgcctgtcaccacactg

SEQ ID NO: 7202 - DNA, 20 bp, Artificial Sequence
  Description of Artificial Sequence: Synthetic oligonucleotide
agtgcctgtcaccacactgg

SEQ ID NO: 7203 - DNA, 20 bp, Artificial Sequence
  Description of Artificial Sequence: Synthetic oligonucleotide
gtgcctgtcaccacactggg

SEQ ID NO: 7204 - DNA, 20 bp, Artificial Sequence
  Description of Artificial Sequence: Synthetic oligonucleotide
tgcctgtcaccacactgggc

SEQ ID NO: 7205 - DNA, 20 bp, Artificial Sequence
  Description of Artificial Sequence: Synthetic oligonucleotide
gcctgtcaccacactgggct

SEQ ID NO: 7206 - DNA, 20 bp, Artificial Sequence
  Description of Artificial Sequence: Synthetic oligonucleotide
cctgtcaccacactgggcta

SEQ ID NO: 7207 - DNA, 20 bp, Artificial Sequence
  Description of Artificial Sequence: Synthetic oligonucleotide
ctgtcaccacactgggctaa

SEQ ID NO: 7208 - DNA, 20 bp, Artificial Sequence
  Description of Artificial Sequence: Synthetic oligonucleotide
tgtcaccacactgggctaat

SEQ ID NO: 7209 - DNA, 20 bp, Artificial Sequence
  Description of Artificial Sequence: Synthetic oligonucleotide
gtcaccacactgggctaatt

SEQ ID NO: 7210 - DNA, 20 bp, Artificial Sequence
  Description of Artificial Sequence: Synthetic oligonucleotide
tcaccacactgggctaattt

SEQ ID NO: 7211 - DNA, 20 bp, Artificial Sequence
  Description of Artificial Sequence: Synthetic oligonucleotide
caccacactgggctaatttt

SEQ ID NO: 7212 - DNA, 20 bp, Artificial Sequence
  Description of Artificial Sequence: Synthetic oligonucleotide
accacactgggctaattttt

SEQ ID NO: 7213 - DNA, 20 bp, Artificial Sequence
  Description of Artificial Sequence: Synthetic oligonucleotide
ccacactgggctaatttttg

SEQ ID NO: 7214 - DNA, 20 bp, Artificial Sequence
  Description of Artificial Sequence: Synthetic oligonucleotide
cacactgggctaatttttgt

SEQ ID NO: 7215 - DNA, 20 bp, Artificial Sequence
  Description of Artificial Sequence: Synthetic oligonucleotide
acactgggctaatttttgta

SEQ ID NO: 7216 - DNA, 20 bp, Artificial Sequence
  Description of Artificial Sequence: Synthetic oligonucleotide
cactgggctaatttttgtat

SEQ ID NO: 7217 - DNA, 20 bp, Artificial Sequence
  Description of Artificial Sequence: Synthetic oligonucleotide
actgggctaatttttgtatt

SEQ ID NO: 7218 - DNA, 20 bp, Artificial Sequence
  Description of Artificial Sequence: Synthetic oligonucleotide
ctgggctaatttttgtattt

SEQ ID NO: 7219 - DNA, 20 bp, Artificial Sequence
  Description of Artificial Sequence: Synthetic oligonucleotide
tgggctaatttttgtatttt

SEQ ID NO: 7220 - DNA, 20 bp, Artificial Sequence
  Description of Artificial Sequence: Synthetic oligonucleotide
gggctaatttttgtattttt

SEQ ID NO: 7221 - DNA, 20 bp, Artificial Sequence
  Description of Artificial Sequence: Synthetic oligonucleotide
ggctaatttttgtattttta

SEQ ID NO: 7222 - DNA, 20 bp, Artificial Sequence
  Description of Artificial Sequence: Synthetic oligonucleotide
gctaatttttgtatttttag

SEQ ID NO: 7223 - DNA, 20 bp, Artificial Sequence
  Description of Artificial Sequence: Synthetic oligonucleotide
ctaatttttgtatttttagt

SEQ ID NO: 7224 - DNA, 20 bp, Artificial Sequence
  Description of Artificial Sequence: Synthetic oligonucleotide
taatttttgtatttttagta

SEQ ID NO: 7225 - DNA, 20 bp, Artificial Sequence
  Description of Artificial Sequence: Synthetic oligonucleotide
aatttttgtatttttagtag

SEQ ID NO: 7226 - DNA, 20 bp, Artificial Sequence
  Description of Artificial Sequence: Synthetic oligonucleotide
atttttgtatttttagtaga

SEQ ID NO: 7227 - DNA, 20 bp, Artificial Sequence
  Description of Artificial Sequence: Synthetic oligonucleotide
tttttgtatttttagtagag

SEQ ID NO: 7228 - DNA, 20 bp, Artificial Sequence
  Description of Artificial Sequence: Synthetic oligonucleotide
ttttgtatttttagtagaga

SEQ ID NO: 7229 - DNA, 20 bp, Artificial Sequence
  Description of Artificial Sequence: Synthetic oligonucleotide
tttgtatttttagtagagac

SEQ ID NO: 7230 - DNA, 20 bp, Artificial Sequence
  Description of Artificial Sequence: Synthetic oligonucleotide
ttgtatttttagtagagact

SEQ ID NO: 7231 - DNA, 20 bp, Artificial Sequence
  Description of Artificial Sequence: Synthetic oligonucleotide
tgtatttttagtagagactg

SEQ ID NO: 7232 - DNA, 20 bp, Artificial Sequence
  Description of Artificial Sequence: Synthetic oligonucleotide
gtatttttagtagagactgg

SEQ ID NO: 7233 - DNA, 20 bp, Artificial Sequence
  Description of Artificial Sequence: Synthetic oligonucleotide
tatttttagtagagactggg

SEQ ID NO: 7234 - DNA, 20 bp, Artificial Sequence
  Description of Artificial Sequence: Synthetic oligonucleotide
atttttagtagagactgggt

SEQ ID NO: 7235 - DNA, 20 bp, Artificial Sequence
  Description of Artificial Sequence: Synthetic oligonucleotide
tttttagtagagactgggtt

SEQ ID NO: 7236 - DNA, 20 bp, Artificial Sequence
  Description of Artificial Sequence: Synthetic oligonucleotide
ttttagtagagactgggttt

SEQ ID NO: 7237 - DNA, 20 bp, Artificial Sequence
  Description of Artificial Sequence: Synthetic oligonucleotide
tttagtagagactgggtttc

SEQ ID NO: 7238 - DNA, 20 bp, Artificial Sequence
  Description of Artificial Sequence: Synthetic oligonucleotide
ttagtagagactgggtttca

SEQ ID NO: 7239 - DNA, 20 bp, Artificial Sequence
  Description of Artificial Sequence: Synthetic oligonucleotide
tagtagagactgggtttcag

SEQ ID NO: 7240 - DNA, 20 bp, Artificial Sequence
  Description of Artificial Sequence: Synthetic oligonucleotide
agtagagactgggtttcagc

SEQ ID NO: 7241 - DNA, 20 bp, Artificial Sequence
  Description of Artificial Sequence: Synthetic oligonucleotide
gtagagactgggtttcagca

SEQ ID NO: 7242 - DNA, 20 bp, Artificial Sequence
  Description of Artificial Sequence: Synthetic oligonucleotide
tagagactgggtttcagcat

SEQ ID NO: 7243 - DNA, 20 bp, Artificial Sequence
  Description of Artificial Sequence: Synthetic oligonucleotide
agagactgggtttcagcatg

SEQ ID NO: 7244 - DNA, 20 bp, Artificial Sequence
  Description of Artificial Sequence: Synthetic oligonucleotide
gagactgggtttcagcatgt

SEQ ID NO: 7245 - DNA, 20 bp, Artificial Sequence
  Description of Artificial Sequence: Synthetic oligonucleotide
agactgggtttcagcatgtt

SEQ ID NO: 7246 - DNA, 20 bp, Artificial Sequence
  Description of Artificial Sequence: Synthetic oligonucleotide
gactgggtttcagcatgttg

SEQ ID NO: 7247 - DNA, 20 bp, Artificial Sequence
  Description of Artificial Sequence: Synthetic oligonucleotide
actgggtttcagcatgttgg

SEQ ID NO: 7248 - DNA, 20 bp, Artificial Sequence
  Description of Artificial Sequence: Synthetic oligonucleotide
ctgggtttcagcatgttggc

SEQ ID NO: 7249 - DNA, 20 bp, Artificial Sequence
  Description of Artificial Sequence: Synthetic oligonucleotide
tgggtttcagcatgttggcc

SEQ ID NO: 7250 - DNA, 20 bp, Artificial Sequence
  Description of Artificial Sequence: Synthetic oligonucleotide
gggtttcagcatgttggcca

SEQ ID NO: 7251 - DNA, 20 bp, Artificial Sequence
  Description of Artificial Sequence: Synthetic oligonucleotide
ggtttcagcatgttggccag

SEQ ID NO: 7252 - DNA, 20 bp, Artificial Sequence
  Description of Artificial Sequence: Synthetic oligonucleotide
gtttcagcatgttggccagg

SEQ ID NO: 7253 - DNA, 20 bp, Artificial Sequence
  Description of Artificial Sequence: Synthetic oligonucleotide
tttcagcatgttggccaggc

SEQ ID NO: 7254 - DNA, 20 bp, Artificial Sequence
  Description of Artificial Sequence: Synthetic oligonucleotide
ttcagcatgttggccaggct

SEQ ID NO: 7255 - DNA, 20 bp, Artificial Sequence
  Description of Artificial Sequence: Synthetic oligonucleotide
tcagcatgttggccaggctg

SEQ ID NO: 7256 - DNA, 20 bp, Artificial Sequence
  Description of Artificial Sequence: Synthetic oligonucleotide
cagcatgttggccaggctgg

SEQ ID NO: 7257 - DNA, 20 bp, Artificial Sequence
  Description of Artificial Sequence: Synthetic oligonucleotide
agcatgttggccaggctggt

SEQ ID NO: 7258 - DNA, 20 bp, Artificial Sequence
  Description of Artificial Sequence: Synthetic oligonucleotide
gcatgttggccaggctggtc

SEQ ID NO: 7259 - DNA, 20 bp, Artificial Sequence
  Description of Artificial Sequence: Synthetic oligonucleotide
catgttggccaggctggtct

SEQ ID NO: 7260 - DNA, 20 bp, Artificial Sequence
  Description of Artificial Sequence: Synthetic oligonucleotide
atgttggccaggctggtctc

SEQ ID NO: 7261 - DNA, 20 bp, Artificial Sequence
  Description of Artificial Sequence: Synthetic oligonucleotide
tgttggccaggctggtctca

SEQ ID NO: 7262 - DNA, 20 bp, Artificial Sequence
  Description of Artificial Sequence: Synthetic oligonucleotide
gttggccaggctggtctcaa

SEQ ID NO: 7263 - DNA, 20 bp, Artificial Sequence
  Description of Artificial Sequence: Synthetic oligonucleotide
ttggccaggctggtctcaaa

SEQ ID NO: 7264 - DNA, 20 bp, Artificial Sequence
  Description of Artificial Sequence: Synthetic oligonucleotide
tggccaggctggtctcaaag

SEQ ID NO: 7265 - DNA, 20 bp, Artificial Sequence
  Description of Artificial Sequence: Synthetic oligonucleotide
ggccaggctggtctcaaagt

SEQ ID NO: 7266 - DNA, 20 bp, Artificial Sequence
  Description of Artificial Sequence: Synthetic oligonucleotide
gccaggctggtctcaaagtc

SEQ ID NO: 7267 - DNA, 20 bp, Artificial Sequence
  Description of Artificial Sequence: Synthetic oligonucleotide
ccaggctggtctcaaagtcc

SEQ ID NO: 7268 - DNA, 20 bp, Artificial Sequence
  Description of Artificial Sequence: Synthetic oligonucleotide
caggctggtctcaaagtcct

SEQ ID NO: 7269 - DNA, 20 bp, Artificial Sequence
  Description of Artificial Sequence: Synthetic oligonucleotide
aggctggtctcaaagtcctg

SEQ ID NO: 7270 - DNA, 20 bp, Artificial Sequence
  Description of Artificial Sequence: Synthetic oligonucleotide
ggctggtctcaaagtcctga

SEQ ID NO: 7271 - DNA, 20 bp, Artificial Sequence
  Description of Artificial Sequence: Synthetic oligonucleotide
gctggtctcaaagtcctgac

SEQ ID NO: 7272 - DNA, 20 bp, Artificial Sequence
  Description of Artificial Sequence: Synthetic oligonucleotide
ctggtctcaaagtcctgacc

SEQ ID NO: 7273 - DNA, 20 bp, Artificial Sequence
  Description of Artificial Sequence: Synthetic oligonucleotide
tggtctcaaagtcctgacct

SEQ ID NO: 7274 - DNA, 20 bp, Artificial Sequence
  Description of Artificial Sequence: Synthetic oligonucleotide
ggtctcaaagtcctgacctc

SEQ ID NO: 7275 - DNA, 20 bp, Artificial Sequence
  Description of Artificial Sequence: Synthetic oligonucleotide
gtctcaaagtcctgacctca

SEQ ID NO: 7276 - DNA, 20 bp, Artificial Sequence
  Description of Artificial Sequence: Synthetic oligonucleotide
tctcaaagtcctgacctcag

SEQ ID NO: 7277 - DNA, 20 bp, Artificial Sequence
  Description of Artificial Sequence: Synthetic oligonucleotide
ctcaaagtcctgacctcagg

SEQ ID NO: 7278 - DNA, 20 bp, Artificial Sequence
  Description of Artificial Sequence: Synthetic oligonucleotide
tcaaagtcctgacctcaggt

SEQ ID NO: 7279 - DNA, 20 bp, Artificial Sequence
  Description of Artificial Sequence: Synthetic oligonucleotide
caaagtcctgacctcaggtg

SEQ ID NO: 7280 - DNA, 20 bp, Artificial Sequence
  Description of Artificial Sequence: Synthetic oligonucleotide
aaagtcctgacctcaggtga

SEQ ID NO: 7281 - DNA, 20 bp, Artificial Sequence
  Description of Artificial Sequence: Synthetic oligonucleotide
aagtcctgacctcaggtgat

SEQ ID NO: 7282 - DNA, 20 bp, Artificial Sequence
  Description of Artificial Sequence: Synthetic oligonucleotide
agtcctgacctcaggtgatt

SEQ ID NO: 7283 - DNA, 20 bp, Artificial Sequence
  Description of Artificial Sequence: Synthetic oligonucleotide
gtcctgacctcaggtgattg

SEQ ID NO: 7284 - DNA, 20 bp, Artificial Sequence
  Description of Artificial Sequence: Synthetic oligonucleotide
tcctgacctcaggtgattgt

SEQ ID NO: 7285 - DNA, 20 bp, Artificial Sequence
  Description of Artificial Sequence: Synthetic oligonucleotide
cctgacctcaggtgattgtt

SEQ ID NO: 7286 - DNA, 20 bp, Artificial Sequence
  Description of Artificial Sequence: Synthetic oligonucleotide
ctgacctcaggtgattgttc

SEQ ID NO: 7287 - DNA, 20 bp, Artificial Sequence
  Description of Artificial Sequence: Synthetic oligonucleotide
tgacctcaggtgattgttcc

SEQ ID NO: 7288 - DNA, 20 bp, Artificial Sequence
  Description of Artificial Sequence: Synthetic oligonucleotide
gacctcaggtgattgttccg

SEQ ID NO: 7289 - DNA, 20 bp, Artificial Sequence
  Description of Artificial Sequence: Synthetic oligonucleotide
acctcaggtgattgttccgc

SEQ ID NO: 7290 - DNA, 20 bp, Artificial Sequence
  Description of Artificial Sequence: Synthetic oligonucleotide
cctcaggtgattgttccgcc

SEQ ID NO: 7291 - DNA, 20 bp, Artificial Sequence
  Description of Artificial Sequence: Synthetic oligonucleotide
ctcaggtgattgttccgccc

SEQ ID NO: 7292 - DNA, 20 bp, Artificial Sequence
  Description of Artificial Sequence: Synthetic oligonucleotide
tcaggtgattgttccgccca

SEQ ID NO: 7293 - DNA, 20 bp, Artificial Sequence
  Description of Artificial Sequence: Synthetic oligonucleotide
caggtgattgttccgcccac

SEQ ID NO: 7294 - DNA, 20 bp, Artificial Sequence
  Description of Artificial Sequence: Synthetic oligonucleotide
aggtgattgttccgcccacc

SEQ ID NO: 7295 - DNA, 20 bp, Artificial Sequence
  Description of Artificial Sequence: Synthetic oligonucleotide
ggtgattgttccgcccacct

SEQ ID NO: 7296 - DNA, 20 bp, Artificial Sequence
  Description of Artificial Sequence: Synthetic oligonucleotide
gtgattgttccgcccacctc

SEQ ID NO: 7297 - DNA, 20 bp, Artificial Sequence
  Description of Artificial Sequence: Synthetic oligonucleotide
tgattgttccgcccacctca

SEQ ID NO: 7298 - DNA, 20 bp, Artificial Sequence
  Description of Artificial Sequence: Synthetic oligonucleotide
gattgttccgcccacctcac

SEQ ID NO: 7299 - DNA, 20 bp, Artificial Sequence
  Description of Artificial Sequence: Synthetic oligonucleotide
attgttccgcccacctcacc

SEQ ID NO: 7300 - DNA, 20 bp, Artificial Sequence
  Description of Artificial Sequence: Synthetic oligonucleotide
ttgttccgcccacctcacct

SEQ ID NO: 7301 - DNA, 20 bp, Artificial Sequence
  Description of Artificial Sequence: Synthetic oligonucleotide
tgttccgcccacctcacctc

SEQ ID NO: 7302 - DNA, 20 bp, Artificial Sequence
  Description of Artificial Sequence: Synthetic oligonucleotide
gttccgcccacctcacctcc

SEQ ID NO: 7303 - DNA, 20 bp, Artificial Sequence
  Description of Artificial Sequence: Synthetic oligonucleotide
ttccgcccacctcacctccc

SEQ ID NO: 7304 - DNA, 20 bp, Artificial Sequence
  Description of Artificial Sequence: Synthetic oligonucleotide
tccgcccacctcacctccca

SEQ ID NO: 7305 - DNA, 20 bp, Artificial Sequence
  Description of Artificial Sequence: Synthetic oligonucleotide
ccgcccacctcacctcccaa

SEQ ID NO: 7306 - DNA, 20 bp, Artificial Sequence
  Description of Artificial Sequence: Synthetic oligonucleotide
cgcccacctcacctcccaaa

SEQ ID NO: 7307 - DNA, 20 bp, Artificial Sequence
  Description of Artificial Sequence: Synthetic oligonucleotide
gcccacctcacctcccaaaa

SEQ ID NO: 7308 - DNA, 20 bp, Artificial Sequence
  Description of Artificial Sequence: Synthetic oligonucleotide
cccacctcacctcccaaaaa

SEQ ID NO: 7309 - DNA, 20 bp, Artificial Sequence
  Description of Artificial Sequence: Synthetic oligonucleotide
ccacctcacctcccaaaaaa

SEQ ID NO: 7310 - DNA, 20 bp, Artificial Sequence
  Description of Artificial Sequence: Synthetic oligonucleotide
cacctcacctcccaaaaaac

SEQ ID NO: 7311 - DNA, 20 bp, Artificial Sequence
  Description of Artificial Sequence: Synthetic oligonucleotide
acctcacctcccaaaaaact

SEQ ID NO: 7312 - DNA, 20 bp, Artificial Sequence
  Description of Artificial Sequence: Synthetic oligonucleotide
cctcacctcccaaaaaactt

SEQ ID NO: 7313 - DNA, 20 bp, Artificial Sequence
  Description of Artificial Sequence: Synthetic oligonucleotide
ctcacctcccaaaaaacttg

SEQ ID NO: 7314 - DNA, 20 bp, Artificial Sequence
  Description of Artificial Sequence: Synthetic oligonucleotide
tcacctcccaaaaaacttgg

SEQ ID NO: 7315 - DNA, 20 bp, Artificial Sequence
  Description of Artificial Sequence: Synthetic oligonucleotide
cacctcccaaaaaacttggg

SEQ ID NO: 7316 - DNA, 20 bp, Artificial Sequence
  Description of Artificial Sequence: Synthetic oligonucleotide
acctcccaaaaaacttggga

SEQ ID NO: 7317 - DNA, 20 bp, Artificial Sequence
  Description of Artificial Sequence: Synthetic oligonucleotide
cctcccaaaaaacttgggat

SEQ ID NO: 7318 - DNA, 20 bp, Artificial Sequence
  Description of Artificial Sequence: Synthetic oligonucleotide
ctcccaaaaaacttgggatt

SEQ ID NO: 7319 - DNA, 20 bp, Artificial Sequence
  Description of Artificial Sequence: Synthetic oligonucleotide
tcccaaaaaacttgggatta

SEQ ID NO: 7320 - DNA, 20 bp, Artificial Sequence
  Description of Artificial Sequence: Synthetic oligonucleotide
cccaaaaaacttgggattac

SEQ ID NO: 7321 - DNA, 20 bp, Artificial Sequence
  Description of Artificial Sequence: Synthetic oligonucleotide
ccaaaaaacttgggattaca

SEQ ID NO: 7322 - DNA, 20 bp, Artificial Sequence
  Description of Artificial Sequence: Synthetic oligonucleotide
caaaaaacttgggattacag

SEQ ID NO: 7323 - DNA, 20 bp, Artificial Sequence
  Description of Artificial Sequence: Synthetic oligonucleotide
aaaaaacttgggattacagg

SEQ ID NO: 7324 - DNA, 20 bp, Artificial Sequence
  Description of Artificial Sequence: Synthetic oligonucleotide
aaaaacttgggattacaggt

SEQ ID NO: 7325 - DNA, 20 bp, Artificial Sequence
  Description of Artificial Sequence: Synthetic oligonucleotide
aaaacttgggattacaggtg

SEQ ID NO: 7326 - DNA, 20 bp, Artificial Sequence
  Description of Artificial Sequence: Synthetic oligonucleotide
aaacttgggattacaggtgt

SEQ ID NO: 7327 - DNA, 20 bp, Artificial Sequence
  Description of Artificial Sequence: Synthetic oligonucleotide
aacttgggattacaggtgtg

SEQ ID NO: 7328 - DNA, 20 bp, Artificial Sequence
  Description of Artificial Sequence: Synthetic oligonucleotide
acttgggattacaggtgtga

SEQ ID NO: 7329 - DNA, 20 bp, Artificial Sequence
  Description of Artificial Sequence: Synthetic oligonucleotide
cttgggattacaggtgtgag

SEQ ID NO: 7330 - DNA, 20 bp, Artificial Sequence
  Description of Artificial Sequence: Synthetic oligonucleotide
ttgggattacaggtgtgagc

SEQ ID NO: 7331 - DNA, 20 bp, Artificial Sequence
  Description of Artificial Sequence: Synthetic oligonucleotide
tgggattacaggtgtgagcc

SEQ ID NO: 7332 - DNA, 20 bp, Artificial Sequence
  Description of Artificial Sequence: Synthetic oligonucleotide
gggattacaggtgtgagcca

SEQ ID NO: 7333 - DNA, 20 bp, Artificial Sequence
  Description of Artificial Sequence: Synthetic oligonucleotide
ggattacaggtgtgagccac

SEQ ID NO: 7334 - DNA, 20 bp, Artificial Sequence
  Description of Artificial Sequence: Synthetic oligonucleotide
gattacaggtgtgagccacc

SEQ ID NO: 7335 - DNA, 20 bp, Artificial Sequence
  Description of Artificial Sequence: Synthetic oligonucleotide
attacaggtgtgagccacca

SEQ ID NO: 7336 - DNA, 20 bp, Artificial Sequence
  Description of Artificial Sequence: Synthetic oligonucleotide
ttacaggtgtgagccaccat

SEQ ID NO: 7337 - DNA, 20 bp, Artificial Sequence
  Description of Artificial Sequence: Synthetic oligonucleotide
tacaggtgtgagccaccatg

SEQ ID NO: 7338 - DNA, 20 bp, Artificial Sequence
  Description of Artificial Sequence: Synthetic oligonucleotide
acaggtgtgagccaccatgc

SEQ ID NO: 7339 - DNA, 20 bp, Artificial Sequence
  Description of Artificial Sequence: Synthetic oligonucleotide
caggtgtgagccaccatgcc

SEQ ID NO: 7340 - DNA, 20 bp, Artificial Sequence
  Description of Artificial Sequence: Synthetic oligonucleotide
aggtgtgagccaccatgcct

SEQ ID NO: 7341 - DNA, 20 bp, Artificial Sequence
  Description of Artificial Sequence: Synthetic oligonucleotide
ggtgtgagccaccatgcctg

SEQ ID NO: 7342 - DNA, 20 bp, Artificial Sequence
  Description of Artificial Sequence: Synthetic oligonucleotide
gtgtgagccaccatgcctgg

SEQ ID NO: 7343 - DNA, 20 bp, Artificial Sequence
  Description of Artificial Sequence: Synthetic oligonucleotide
tgtgagccaccatgcctggg

SEQ ID NO: 7344 - DNA, 20 bp, Artificial Sequence
  Description of Artificial Sequence: Synthetic oligonucleotide
gtgagccaccatgcctgggt

SEQ ID NO: 7345 - DNA, 20 bp, Artificial Sequence
  Description of Artificial Sequence: Synthetic oligonucleotide
tgagccaccatgcctgggtg

SEQ ID NO: 7346 - DNA, 20 bp, Artificial Sequence
  Description of Artificial Sequence: Synthetic oligonucleotide
gagccaccatgcctgggtga

SEQ ID NO: 7347 - DNA, 20 bp, Artificial Sequence
  Description of Artificial Sequence: Synthetic oligonucleotide
agccaccatgcctgggtgaa

SEQ ID NO: 7348 - DNA, 20 bp, Artificial Sequence
  Description of Artificial Sequence: Synthetic oligonucleotide
gccaccatgcctgggtgaaa

SEQ ID NO: 7349 - DNA, 20 bp, Artificial Sequence
  Description of Artificial Sequence: Synthetic oligonucleotide
ccaccatgcctgggtgaaaa

SEQ ID NO: 7350 - DNA, 20 bp, Artificial Sequence
  Description of Artificial Sequence: Synthetic oligonucleotide
caccatgcctgggtgaaaat

SEQ ID NO: 7351 - DNA, 20 bp, Artificial Sequence
  Description of Artificial Sequence: Synthetic oligonucleotide
accatgcctgggtgaaaatc

SEQ ID NO: 7352 - DNA, 20 bp, Artificial Sequence
  Description of Artificial Sequence: Synthetic oligonucleotide
ccatgcctgggtgaaaatcc

SEQ ID NO: 7353 - DNA, 20 bp, Artificial Sequence
  Description of Artificial Sequence: Synthetic oligonucleotide
catgcctgggtgaaaatcca

SEQ ID NO: 7354 - DNA, 20 bp, Artificial Sequence
  Description of Artificial Sequence: Synthetic oligonucleotide
atgcctgggtgaaaatccag

SEQ ID NO: 7355 - DNA, 20 bp, Artificial Sequence
  Description of Artificial Sequence: Synthetic oligonucleotide
tgcctgggtgaaaatccaga

SEQ ID NO: 7356 - DNA, 20 bp, Artificial Sequence
  Description of Artificial Sequence: Synthetic oligonucleotide
gcctgggtgaaaatccagat

SEQ ID NO: 7357 - DNA, 20 bp, Artificial Sequence
  Description of Artificial Sequence: Synthetic oligonucleotide
cctgggtgaaaatccagata

SEQ ID NO: 7358 - DNA, 20 bp, Artificial Sequence
  Description of Artificial Sequence: Synthetic oligonucleotide
ctgggtgaaaatccagataa

SEQ ID NO: 7359 - DNA, 20 bp, Artificial Sequence
  Description of Artificial Sequence: Synthetic oligonucleotide
tgggtgaaaatccagataat

SEQ ID NO: 7360 - DNA, 20 bp, Artificial Sequence
  Description of Artificial Sequence: Synthetic oligonucleotide
gggtgaaaatccagataatt

SEQ ID NO: 7361 - DNA, 20 bp, Artificial Sequence
  Description of Artificial Sequence: Synthetic oligonucleotide
ggtgaaaatccagataattt

SEQ ID NO: 7362 - DNA, 20 bp, Artificial Sequence
  Description of Artificial Sequence: Synthetic oligonucleotide
gtgaaaatccagataatttg

SEQ ID NO: 7363 - DNA, 20 bp, Artificial Sequence
  Description of Artificial Sequence: Synthetic oligonucleotide
tgaaaatccagataatttga

SEQ ID NO: 7364 - DNA, 20 bp, Artificial Sequence
  Description of Artificial Sequence: Synthetic oligonucleotide
gaaaatccagataatttgat

SEQ ID NO: 7365 - DNA, 20 bp, Artificial Sequence
  Description of Artificial Sequence: Synthetic oligonucleotide
aaaatccagataatttgatg

SEQ ID NO: 7366 - DNA, 20 bp, Artificial Sequence
  Description of Artificial Sequence: Synthetic oligonucleotide
aaatccagataatttgatgc

SEQ ID NO: 7367 - DNA, 20 bp, Artificial Sequence
  Description of Artificial Sequence: Synthetic oligonucleotide
aatccagataatttgatgct

SEQ ID NO: 7368 - DNA, 20 bp, Artificial Sequence
  Description of Artificial Sequence: Synthetic oligonucleotide
atccagataatttgatgctg

SEQ ID NO: 7369 - DNA, 20 bp, Artificial Sequence
  Description of Artificial Sequence: Synthetic oligonucleotide
tccagataatttgatgctgc

SEQ ID NO: 7370 - DNA, 20 bp, Artificial Sequence
  Description of Artificial Sequence: Synthetic oligonucleotide
ccagataatttgatgctgcc

SEQ ID NO: 7371 - DNA, 20 bp, Artificial Sequence
  Description of Artificial Sequence: Synthetic oligonucleotide
cagataatttgatgctgcct

SEQ ID NO: 7372 - DNA, 20 bp, Artificial Sequence
  Description of Artificial Sequence: Synthetic oligonucleotide
agataatttgatgctgcctt

SEQ ID NO: 7373 - DNA, 20 bp, Artificial Sequence
  Description of Artificial Sequence: Synthetic oligonucleotide
gataatttgatgctgccttc

SEQ ID NO: 7374 - DNA, 20 bp, Artificial Sequence
  Description of Artificial Sequence: Synthetic oligonucleotide
ataatttgatgctgccttcg

SEQ ID NO: 7375 - DNA, 20 bp, Artificial Sequence
  Description of Artificial Sequence: Synthetic oligonucleotide
taatttgatgctgccttcgt

SEQ ID NO: 7376 - DNA, 20 bp, Artificial Sequence
  Description of Artificial Sequence: Synthetic oligonucleotide
aatttgatgctgccttcgtg

SEQ ID NO: 7377 - DNA, 20 bp, Artificial Sequence
  Description of Artificial Sequence: Synthetic oligonucleotide
atttgatgctgccttcgtgt

SEQ ID NO: 7378 - DNA, 20 bp, Artificial Sequence
  Description of Artificial Sequence: Synthetic oligonucleotide
tttgatgctgccttcgtgtt

SEQ ID NO: 7379 - DNA, 20 bp, Artificial Sequence
  Description of Artificial Sequence: Synthetic oligonucleotide
ttgatgctgccttcgtgttt

SEQ ID NO: 7380 - DNA, 20 bp, Artificial Sequence
  Description of Artificial Sequence: Synthetic oligonucleotide
tgatgctgccttcgtgtttt

SEQ ID NO: 7381 - DNA, 20 bp, Artificial Sequence
  Description of Artificial Sequence: Synthetic oligonucleotide
gatgctgccttcgtgttttc

SEQ ID NO: 7382 - DNA, 20 bp, Artificial Sequence
  Description of Artificial Sequence: Synthetic oligonucleotide
atgctgccttcgtgttttct

SEQ ID NO: 7383 - DNA, 20 bp, Artificial Sequence
  Description of Artificial Sequence: Synthetic oligonucleotide
tgctgccttcgtgttttctt

SEQ ID NO: 7384 - DNA, 20 bp, Artificial Sequence
  Description of Artificial Sequence: Synthetic oligonucleotide
gctgccttcgtgttttcttt

SEQ ID NO: 7385 - DNA, 20 bp, Artificial Sequence
  Description of Artificial Sequence: Synthetic oligonucleotide
ctgccttcgtgttttctttt

SEQ ID NO: 7386 - DNA, 20 bp, Artificial Sequence
  Description of Artificial Sequence: Synthetic oligonucleotide
tgccttcgtgttttcttttc

SEQ ID NO: 7387 - DNA, 20 bp, Artificial Sequence
  Description of Artificial Sequence: Synthetic oligonucleotide
gccttcgtgttttcttttct

SEQ ID NO: 7388 - DNA, 20 bp, Artificial Sequence
  Description of Artificial Sequence: Synthetic oligonucleotide
ccttcgtgttttcttttctc

SEQ ID NO: 7389 - DNA, 20 bp, Artificial Sequence
  Description of Artificial Sequence: Synthetic oligonucleotide
cttcgtgttttcttttctcc

SEQ ID NO: 7390 - DNA, 20 bp, Artificial Sequence
  Description of Artificial Sequence: Synthetic oligonucleotide
ttcgtgttttcttttctcct

SEQ ID NO: 7391 - DNA, 20 bp, Artificial Sequence
  Description of Artificial Sequence: Synthetic oligonucleotide
tcgtgttttcttttctcctc

SEQ ID NO: 7392 - DNA, 20 bp, Artificial Sequence
  Description of Artificial Sequence: Synthetic oligonucleotide
cgtgttttcttttctcctcc

SEQ ID NO: 7393 - DNA, 20 bp, Artificial Sequence
  Description of Artificial Sequence: Synthetic oligonucleotide
gtgttttcttttctcctccc

SEQ ID NO: 7394 - DNA, 20 bp, Artificial Sequence
  Description of Artificial Sequence: Synthetic oligonucleotide
tgttttcttttctcctcccc

SEQ ID NO: 7395 - DNA, 20 bp, Artificial Sequence
  Description of Artificial Sequence: Synthetic oligonucleotide
gttttcttttctcctccccc

SEQ ID NO: 7396 - DNA, 20 bp, Artificial Sequence
  Description of Artificial Sequence: Synthetic oligonucleotide
ttttcttttctcctccccca

SEQ ID NO: 7397 - DNA, 20 bp, Artificial Sequence
  Description of Artificial Sequence: Synthetic oligonucleotide
tttcttttctcctcccccaa

SEQ ID NO: 7398 - DNA, 20 bp, Artificial Sequence
  Description of Artificial Sequence: Synthetic oligonucleotide
ttcttttctcctcccccaag

SEQ ID NO: 7399 - DNA, 20 bp, Artificial Sequence
  Description of Artificial Sequence: Synthetic oligonucleotide
tcttttctcctcccccaagg

SEQ ID NO: 7400 - DNA, 20 bp, Artificial Sequence
  Description of Artificial Sequence: Synthetic oligonucleotide
cttttctcctcccccaagga

SEQ ID NO: 7401 - DNA, 20 bp, Artificial Sequence
  Description of Artificial Sequence: Synthetic oligonucleotide
ttttctcctcccccaaggaa

SEQ ID NO: 7402 - DNA, 20 bp, Artificial Sequence
  Description of Artificial Sequence: Synthetic oligonucleotide
tttctcctcccccaaggaat

SEQ ID NO: 7403 - DNA, 20 bp, Artificial Sequence
  Description of Artificial Sequence: Synthetic oligonucleotide
ttctcctcccccaaggaata

SEQ ID NO: 7404 - DNA, 20 bp, Artificial Sequence
  Description of Artificial Sequence: Synthetic oligonucleotide
tctcctcccccaaggaatag

SEQ ID NO: 7405 - DNA, 20 bp, Artificial Sequence
  Description of Artificial Sequence: Synthetic oligonucleotide
ctcctcccccaaggaatagc

SEQ ID NO: 7406 - DNA, 20 bp, Artificial Sequence
  Description of Artificial Sequence: Synthetic oligonucleotide
tcctcccccaaggaatagct

SEQ ID NO: 7407 - DNA, 20 bp, Artificial Sequence
  Description of Artificial Sequence: Synthetic oligonucleotide
cctcccccaaggaatagctg

SEQ ID NO: 7408 - DNA, 20 bp, Artificial Sequence
  Description of Artificial Sequence: Synthetic oligonucleotide
ctcccccaaggaatagctgt

SEQ ID NO: 7409 - DNA, 20 bp, Artificial Sequence
  Description of Artificial Sequence: Synthetic oligonucleotide
tcccccaaggaatagctgtt

SEQ ID NO: 7410 - DNA, 20 bp, Artificial Sequence
  Description of Artificial Sequence: Synthetic oligonucleotide
cccccaaggaatagctgttc

SEQ ID NO: 7411 - DNA, 20 bp, Artificial Sequence
  Description of Artificial Sequence: Synthetic oligonucleotide
ccccaaggaatagctgttct

SEQ ID NO: 7412 - DNA, 20 bp, Artificial Sequence
  Description of Artificial Sequence: Synthetic oligonucleotide
cccaaggaatagctgttcta

SEQ ID NO: 7413 - DNA, 20 bp, Artificial Sequence
  Description of Artificial Sequence: Synthetic oligonucleotide
ccaaggaatagctgttctag

SEQ ID NO: 7414 - DNA, 20 bp, Artificial Sequence
  Description of Artificial Sequence: Synthetic oligonucleotide
caaggaatagctgttctagg

SEQ ID NO: 7415 - DNA, 20 bp, Artificial Sequence
  Description of Artificial Sequence: Synthetic oligonucleotide
aaggaatagctgttctagga

SEQ ID NO: 7416 - DNA, 20 bp, Artificial Sequence
  Description of Artificial Sequence: Synthetic oligonucleotide
aggaatagctgttctaggac

SEQ ID NO: 7417 - DNA, 20 bp, Artificial Sequence
  Description of Artificial Sequence: Synthetic oligonucleotide
ggaatagctgttctaggaca

SEQ ID NO: 7418 - DNA, 20 bp, Artificial Sequence
  Description of Artificial Sequence: Synthetic oligonucleotide
gaatagctgttctaggacat

SEQ ID NO: 7419 - DNA, 20 bp, Artificial Sequence
  Description of Artificial Sequence: Synthetic oligonucleotide
aatagctgttctaggacatg

SEQ ID NO: 7420 - DNA, 20 bp, Artificial Sequence
  Description of Artificial Sequence: Synthetic oligonucleotide
atagctgttctaggacatgg

SEQ ID NO: 7421 - DNA, 20 bp, Artificial Sequence
  Description of Artificial Sequence: Synthetic oligonucleotide
tagctgttctaggacatggc

SEQ ID NO: 7422 - DNA, 20 bp, Artificial Sequence
  Description of Artificial Sequence: Synthetic oligonucleotide
agctgttctaggacatggca

SEQ ID NO: 7423 - DNA, 20 bp, Artificial Sequence
  Description of Artificial Sequence: Synthetic oligonucleotide
gctgttctaggacatggcaa

SEQ ID NO: 7424 - DNA, 20 bp, Artificial Sequence
  Description of Artificial Sequence: Synthetic oligonucleotide
ctgttctaggacatggcaag

SEQ ID NO: 7425 - DNA, 20 bp, Artificial Sequence
  Description of Artificial Sequence: Synthetic oligonucleotide
tgttctaggacatggcaaga

SEQ ID NO: 7426 - DNA, 20 bp, Artificial Sequence
  Description of Artificial Sequence: Synthetic oligonucleotide
gttctaggacatggcaagag

SEQ ID NO: 7427 - DNA, 20 bp, Artificial Sequence
  Description of Artificial Sequence: Synthetic oligonucleotide
ttctaggacatggcaagaga

SEQ ID NO: 7428 - DNA, 20 bp, Artificial Sequence
  Description of Artificial Sequence: Synthetic oligonucleotide
tctaggacatggcaagagat

SEQ ID NO: 7429 - DNA, 20 bp, Artificial Sequence
  Description of Artificial Sequence: Synthetic oligonucleotide
ctaggacatggcaagagatt

SEQ ID NO: 7430 - DNA, 20 bp, Artificial Sequence
  Description of Artificial Sequence: Synthetic oligonucleotide
taggacatggcaagagattt

SEQ ID NO: 7431 - DNA, 20 bp, Artificial Sequence
  Description of Artificial Sequence: Synthetic oligonucleotide
aggacatggcaagagattta

SEQ ID NO: 7432 - DNA, 20 bp, Artificial Sequence
  Description of Artificial Sequence: Synthetic oligonucleotide
ggacatggcaagagatttaa

SEQ ID NO: 7433 - DNA, 20 bp, Artificial Sequence
  Description of Artificial Sequence: Synthetic oligonucleotide
gacatggcaagagatttaaa

SEQ ID NO: 7434 - DNA, 20 bp, Artificial Sequence
  Description of Artificial Sequence: Synthetic oligonucleotide
acatggcaagagatttaaac

SEQ ID NO: 7435 - DNA, 20 bp, Artificial Sequence
  Description of Artificial Sequence: Synthetic oligonucleotide
catggcaagagatttaaact

SEQ ID NO: 7436 - DNA, 20 bp, Artificial Sequence
  Description of Artificial Sequence: Synthetic oligonucleotide
atggcaagagatttaaacta

SEQ ID NO: 7437 - DNA, 20 bp, Artificial Sequence
  Description of Artificial Sequence: Synthetic oligonucleotide
tggcaagagatttaaactaa

SEQ ID NO: 7438 - DNA, 20 bp, Artificial Sequence
  Description of Artificial Sequence: Synthetic oligonucleotide
ggcaagagatttaaactaag

SEQ ID NO: 7439 - DNA, 20 bp, Artificial Sequence
  Description of Artificial Sequence: Synthetic oligonucleotide
gcaagagatttaaactaagt

SEQ ID NO: 7440 - DNA, 20 bp, Artificial Sequence
  Description of Artificial Sequence: Synthetic oligonucleotide
caagagatttaaactaagtt

SEQ ID NO: 7441 - DNA, 20 bp, Artificial Sequence
  Description of Artificial Sequence: Synthetic oligonucleotide
aagagatttaaactaagtta

SEQ ID NO: 7442 - DNA, 20 bp, Artificial Sequence
  Description of Artificial Sequence: Synthetic oligonucleotide
agagatttaaactaagttat

SEQ ID NO: 7443 - DNA, 20 bp, Artificial Sequence
  Description of Artificial Sequence: Synthetic oligonucleotide
gagatttaaactaagttatg

SEQ ID NO: 7444 - DNA, 20 bp, Artificial Sequence
  Description of Artificial Sequence: Synthetic oligonucleotide
agatttaaactaagttatgt

SEQ ID NO: 7445 - DNA, 20 bp, Artificial Sequence
  Description of Artificial Sequence: Synthetic oligonucleotide
gatttaaactaagttatgtg

SEQ ID NO: 7446 - DNA, 20 bp, Artificial Sequence
  Description of Artificial Sequence: Synthetic oligonucleotide
atttaaactaagttatgtgg

SEQ ID NO: 7447 - DNA, 20 bp, Artificial Sequence
  Description of Artificial Sequence: Synthetic oligonucleotide
tttaaactaagttatgtggt

SEQ ID NO: 7448 - DNA, 20 bp, Artificial Sequence
  Description of Artificial Sequence: Synthetic oligonucleotide
ttaaactaagttatgtggtg

SEQ ID NO: 7449 - DNA, 20 bp, Artificial Sequence
  Description of Artificial Sequence: Synthetic oligonucleotide
taaactaagttatgtggtgg

SEQ ID NO: 7450 - DNA, 20 bp, Artificial Sequence
  Description of Artificial Sequence: Synthetic oligonucleotide
aaactaagttatgtggtggt

SEQ ID NO: 7451 - DNA, 20 bp, Artificial Sequence
  Description of Artificial Sequence: Synthetic oligonucleotide
aactaagttatgtggtggtt

SEQ ID NO: 7452 - DNA, 20 bp, Artificial Sequence
  Description of Artificial Sequence: Synthetic oligonucleotide
actaagttatgtggtggtta

SEQ ID NO: 7453 - DNA, 20 bp, Artificial Sequence
  Description of Artificial Sequence: Synthetic oligonucleotide
ctaagttatgtggtggttat

SEQ ID NO: 7454 - DNA, 20 bp, Artificial Sequence
  Description of Artificial Sequence: Synthetic oligonucleotide
taagttatgtggtggttata

SEQ ID NO: 7455 - DNA, 20 bp, Artificial Sequence
  Description of Artificial Sequence: Synthetic oligonucleotide
aagttatgtggtggttataa

SEQ ID NO: 7456 - DNA, 20 bp, Artificial Sequence
  Description of Artificial Sequence: Synthetic oligonucleotide
agttatgtggtggttataag

SEQ ID NO: 7457 - DNA, 20 bp, Artificial Sequence
  Description of Artificial Sequence: Synthetic oligonucleotide
gttatgtggtggttataaga

SEQ ID NO: 7458 - DNA, 20 bp, Artificial Sequence
  Description of Artificial Sequence: Synthetic oligonucleotide
ttatgtggtggttataagaa

SEQ ID NO: 7459 - DNA, 20 bp, Artificial Sequence
  Description of Artificial Sequence: Synthetic oligonucleotide
tatgtggtggttataagaat

SEQ ID NO: 7460 - DNA, 20 bp, Artificial Sequence
  Description of Artificial Sequence: Synthetic oligonucleotide
atgtggtggttataagaatg

SEQ ID NO: 7461 - DNA, 20 bp, Artificial Sequence
  Description of Artificial Sequence: Synthetic oligonucleotide
tgtggtggttataagaatga

SEQ ID NO: 7462 - DNA, 20 bp, Artificial Sequence
  Description of Artificial Sequence: Synthetic oligonucleotide
gtggtggttataagaatgat

SEQ ID NO: 7463 - DNA, 20 bp, Artificial Sequence
  Description of Artificial Sequence: Synthetic oligonucleotide
tggtggttataagaatgatc

SEQ ID NO: 7464 - DNA, 20 bp, Artificial Sequence
  Description of Artificial Sequence: Synthetic oligonucleotide
ggtggttataagaatgatct

SEQ ID NO: 7465 - DNA, 20 bp, Artificial Sequence
  Description of Artificial Sequence: Synthetic oligonucleotide
gtggttataagaatgatctg

SEQ ID NO: 7466 - DNA, 20 bp, Artificial Sequence
  Description of Artificial Sequence: Synthetic oligonucleotide
tggttataagaatgatctga

SEQ ID NO: 7467 - DNA, 20 bp, Artificial Sequence
  Description of Artificial Sequence: Synthetic oligonucleotide
ggttataagaatgatctgat

SEQ ID NO: 7468 - DNA, 20 bp, Artificial Sequence
  Description of Artificial Sequence: Synthetic oligonucleotide
gttataagaatgatctgatc

SEQ ID NO: 7469 - DNA, 20 bp, Artificial Sequence
  Description of Artificial Sequence: Synthetic oligonucleotide
ttataagaatgatctgatct

SEQ ID NO: 7470 - DNA, 20 bp, Artificial Sequence
  Description of Artificial Sequence: Synthetic oligonucleotide
tataagaatgatctgatcta

SEQ ID NO: 7471 - DNA, 20 bp, Artificial Sequence
  Description of Artificial Sequence: Synthetic oligonucleotide
ataagaatgatctgatctat

SEQ ID NO: 7472 - DNA, 20 bp, Artificial Sequence
  Description of Artificial Sequence: Synthetic oligonucleotide
taagaatgatctgatctatg

SEQ ID NO: 7473 - DNA, 20 bp, Artificial Sequence
  Description of Artificial Sequence: Synthetic oligonucleotide
aagaatgatctgatctatgt

SEQ ID NO: 7474 - DNA, 20 bp, Artificial Sequence
  Description of Artificial Sequence: Synthetic oligonucleotide
agaatgatctgatctatgtt

SEQ ID NO: 7475 - DNA, 20 bp, Artificial Sequence
  Description of Artificial Sequence: Synthetic oligonucleotide
gaatgatctgatctatgtta

SEQ ID NO: 7476 - DNA, 20 bp, Artificial Sequence
  Description of Artificial Sequence: Synthetic oligonucleotide
aatgatctgatctatgttag

SEQ ID NO: 7477 - DNA, 20 bp, Artificial Sequence
  Description of Artificial Sequence: Synthetic oligonucleotide
atgatctgatctatgttaga

SEQ ID NO: 7478 - DNA, 20 bp, Artificial Sequence
  Description of Artificial Sequence: Synthetic oligonucleotide
tgatctgatctatgttagaa

SEQ ID NO: 7479 - DNA, 20 bp, Artificial Sequence
  Description of Artificial Sequence: Synthetic oligonucleotide
gatctgatctatgttagaag

SEQ ID NO: 7480 - DNA, 20 bp, Artificial Sequence
  Description of Artificial Sequence: Synthetic oligonucleotide
atctgatctatgttagaagg

SEQ ID NO: 7481 - DNA, 20 bp, Artificial Sequence
  Description of Artificial Sequence: Synthetic oligonucleotide
tctgatctatgttagaaggc

SEQ ID NO: 7482 - DNA, 20 bp, Artificial Sequence
  Description of Artificial Sequence: Synthetic oligonucleotide
ctgatctatgttagaaggct

SEQ ID NO: 7483 - DNA, 20 bp, Artificial Sequence
  Description of Artificial Sequence: Synthetic oligonucleotide
tgatctatgttagaaggctt

SEQ ID NO: 7484 - DNA, 20 bp, Artificial Sequence
  Description of Artificial Sequence: Synthetic oligonucleotide
gatctatgttagaaggcttg

SEQ ID NO: 7485 - DNA, 20 bp, Artificial Sequence
  Description of Artificial Sequence: Synthetic oligonucleotide
atctatgttagaaggcttgt

SEQ ID NO: 7486 - DNA, 20 bp, Artificial Sequence
  Description of Artificial Sequence: Synthetic oligonucleotide
tctatgttagaaggcttgtt

SEQ ID NO: 7487 - DNA, 20 bp, Artificial Sequence
  Description of Artificial Sequence: Synthetic oligonucleotide
ctatgttagaaggcttgttg

SEQ ID NO: 7488 - DNA, 20 bp, Artificial Sequence
  Description of Artificial Sequence: Synthetic oligonucleotide
tatgttagaaggcttgttgt

SEQ ID NO: 7489 - DNA, 20 bp, Artificial Sequence
  Description of Artificial Sequence: Synthetic oligonucleotide
atgttagaaggcttgttgtt

SEQ ID NO: 7490 - DNA, 20 bp, Artificial Sequence
  Description of Artificial Sequence: Synthetic oligonucleotide
tgttagaaggcttgttgttt

SEQ ID NO: 7491 - DNA, 20 bp, Artificial Sequence
  Description of Artificial Sequence: Synthetic oligonucleotide
gttagaaggcttgttgtttg

SEQ ID NO: 7492 - DNA, 20 bp, Artificial Sequence
  Description of Artificial Sequence: Synthetic oligonucleotide
ttagaaggcttgttgtttga

SEQ ID NO: 7493 - DNA, 20 bp, Artificial Sequence
  Description of Artificial Sequence: Synthetic oligonucleotide
tagaaggcttgttgtttgac

SEQ ID NO: 7494 - DNA, 20 bp, Artificial Sequence
  Description of Artificial Sequence: Synthetic oligonucleotide
agaaggcttgttgtttgact

SEQ ID NO: 7495 - DNA, 20 bp, Artificial Sequence
  Description of Artificial Sequence: Synthetic oligonucleotide
gaaggcttgttgtttgactg

SEQ ID NO: 7496 - DNA, 20 bp, Artificial Sequence
  Description of Artificial Sequence: Synthetic oligonucleotide
aaggcttgttgtttgactga

SEQ ID NO: 7497 - DNA, 20 bp, Artificial Sequence
  Description of Artificial Sequence: Synthetic oligonucleotide
aggcttgttgtttgactgat

SEQ ID NO: 7498 - DNA, 20 bp, Artificial Sequence
  Description of Artificial Sequence: Synthetic oligonucleotide
ggcttgttgtttgactgata

SEQ ID NO: 7499 - DNA, 20 bp, Artificial Sequence
  Description of Artificial Sequence: Synthetic oligonucleotide
gcttgttgtttgactgataa

SEQ ID NO: 7500 - DNA, 20 bp, Artificial Sequence
  Description of Artificial Sequence: Synthetic oligonucleotide
cttgttgtttgactgataat

SEQ ID NO: 7501 - DNA, 20 bp, Artificial Sequence
  Description of Artificial Sequence: Synthetic oligonucleotide
ttgttgtttgactgataatg

SEQ ID NO: 7502 - DNA, 20 bp, Artificial Sequence
  Description of Artificial Sequence: Synthetic oligonucleotide
tgttgtttgactgataatga

SEQ ID NO: 7503 - DNA, 20 bp, Artificial Sequence
  Description of Artificial Sequence: Synthetic oligonucleotide
gttgtttgactgataatgat

SEQ ID NO: 7504 - DNA, 20 bp, Artificial Sequence
  Description of Artificial Sequence: Synthetic oligonucleotide
ttgtttgactgataatgatt

SEQ ID NO: 7505 - DNA, 20 bp, Artificial Sequence
  Description of Artificial Sequence: Synthetic oligonucleotide
tgtttgactgataatgattt

SEQ ID NO: 7506 - DNA, 20 bp, Artificial Sequence
  Description of Artificial Sequence: Synthetic oligonucleotide
gtttgactgataatgatttg

SEQ ID NO: 7507 - DNA, 20 bp, Artificial Sequence
  Description of Artificial Sequence: Synthetic oligonucleotide
tttgactgataatgatttga

SEQ ID NO: 7508 - DNA, 20 bp, Artificial Sequence
  Description of Artificial Sequence: Synthetic oligonucleotide
ttgactgataatgatttgaa

SEQ ID NO: 7509 - DNA, 20 bp, Artificial Sequence
  Description of Artificial Sequence: Synthetic oligonucleotide
tgactgataatgatttgaag

SEQ ID NO: 7510 - DNA, 20 bp, Artificial Sequence
  Description of Artificial Sequence: Synthetic oligonucleotide
gactgataatgatttgaagg

SEQ ID NO: 7511 - DNA, 20 bp, Artificial Sequence
  Description of Artificial Sequence: Synthetic oligonucleotide
actgataatgatttgaaggg

SEQ ID NO: 7512 - DNA, 20 bp, Artificial Sequence
  Description of Artificial Sequence: Synthetic oligonucleotide
ctgataatgatttgaagggg

SEQ ID NO: 7513 - DNA, 20 bp, Artificial Sequence
  Description of Artificial Sequence: Synthetic oligonucleotide
tgataatgatttgaaggggc

SEQ ID NO: 7514 - DNA, 20 bp, Artificial Sequence
  Description of Artificial Sequence: Synthetic oligonucleotide
gataatgatttgaaggggcc

SEQ ID NO: 7515 - DNA, 20 bp, Artificial Sequence
  Description of Artificial Sequence: Synthetic oligonucleotide
ataatgatttgaaggggcca

SEQ ID NO: 7516 - DNA, 20 bp, Artificial Sequence
  Description of Artificial Sequence: Synthetic oligonucleotide
taatgatttgaaggggccaa

SEQ ID NO: 7517 - DNA, 20 bp, Artificial Sequence
  Description of Artificial Sequence: Synthetic oligonucleotide
aatgatttgaaggggccaaa

SEQ ID NO: 7518 - DNA, 20 bp, Artificial Sequence
  Description of Artificial Sequence: Synthetic oligonucleotide
atgatttgaaggggccaaac

SEQ ID NO: 7519 - DNA, 20 bp, Artificial Sequence
  Description of Artificial Sequence: Synthetic oligonucleotide
tgatttgaaggggccaaaca

SEQ ID NO: 7520 - DNA, 20 bp, Artificial Sequence
  Description of Artificial Sequence: Synthetic oligonucleotide
gatttgaaggggccaaacag

SEQ ID NO: 7521 - DNA, 20 bp, Artificial Sequence
  Description of Artificial Sequence: Synthetic oligonucleotide
atttgaaggggccaaacaga

SEQ ID NO: 7522 - DNA, 20 bp, Artificial Sequence
  Description of Artificial Sequence: Synthetic oligonucleotide
tttgaaggggccaaacagat

SEQ ID NO: 7523 - DNA, 20 bp, Artificial Sequence
  Description of Artificial Sequence: Synthetic oligonucleotide
ttgaaggggccaaacagatg

SEQ ID NO: 7524 - DNA, 20 bp, Artificial Sequence
  Description of Artificial Sequence: Synthetic oligonucleotide
tgaaggggccaaacagatgc

SEQ ID NO: 7525 - DNA, 20 bp, Artificial Sequence
  Description of Artificial Sequence: Synthetic oligonucleotide
gaaggggccaaacagatgcc

SEQ ID NO: 7526 - DNA, 20 bp, Artificial Sequence
  Description of Artificial Sequence: Synthetic oligonucleotide
aaggggccaaacagatgcct

SEQ ID NO: 7527 - DNA, 20 bp, Artificial Sequence
  Description of Artificial Sequence: Synthetic oligonucleotide
aggggccaaacagatgcctg

SEQ ID NO: 7528 - DNA, 20 bp, Artificial Sequence
  Description of Artificial Sequence: Synthetic oligonucleotide
ggggccaaacagatgcctgg

SEQ ID NO: 7529 - DNA, 20 bp, Artificial Sequence
  Description of Artificial Sequence: Synthetic oligonucleotide
gggccaaacagatgcctggg

SEQ ID NO: 7530 - DNA, 20 bp, Artificial Sequence
  Description of Artificial Sequence: Synthetic oligonucleotide
ggccaaacagatgcctgggt

SEQ ID NO: 7531 - DNA, 20 bp, Artificial Sequence
  Description of Artificial Sequence: Synthetic oligonucleotide
gccaaacagatgcctgggtt

SEQ ID NO: 7532 - DNA, 20 bp, Artificial Sequence
  Description of Artificial Sequence: Synthetic oligonucleotide
ccaaacagatgcctgggttt

SEQ ID NO: 7533 - DNA, 20 bp, Artificial Sequence
  Description of Artificial Sequence: Synthetic oligonucleotide
caaacagatgcctgggtttg

SEQ ID NO: 7534 - DNA, 20 bp, Artificial Sequence
  Description of Artificial Sequence: Synthetic oligonucleotide
aaacagatgcctgggtttgg

SEQ ID NO: 7535 - DNA, 20 bp, Artificial Sequence
  Description of Artificial Sequence: Synthetic oligonucleotide
aacagatgcctgggtttgga

SEQ ID NO: 7536 - DNA, 20 bp, Artificial Sequence
  Description of Artificial Sequence: Synthetic oligonucleotide
acagatgcctgggtttggag

SEQ ID NO: 7537 - DNA, 20 bp, Artificial Sequence
  Description of Artificial Sequence: Synthetic oligonucleotide
cagatgcctgggtttggagt

SEQ ID NO: 7538 - DNA, 20 bp, Artificial Sequence
  Description of Artificial Sequence: Synthetic oligonucleotide
agatgcctgggtttggagtg

SEQ ID NO: 7539 - DNA, 20 bp, Artificial Sequence
  Description of Artificial Sequence: Synthetic oligonucleotide
gatgcctgggtttggagtgc

SEQ ID NO: 7540 - DNA, 20 bp, Artificial Sequence
  Description of Artificial Sequence: Synthetic oligonucleotide
atgcctgggtttggagtgca

SEQ ID NO: 7541 - DNA, 20 bp, Artificial Sequence
  Description of Artificial Sequence: Synthetic oligonucleotide
tgcctgggtttggagtgcag

SEQ ID NO: 7542 - DNA, 20 bp, Artificial Sequence
  Description of Artificial Sequence: Synthetic oligonucleotide
gcctgggtttggagtgcagg

SEQ ID NO: 7543 - DNA, 20 bp, Artificial Sequence
  Description of Artificial Sequence: Synthetic oligonucleotide
cctgggtttggagtgcaggg

SEQ ID NO: 7544 - DNA, 20 bp, Artificial Sequence
  Description of Artificial Sequence: Synthetic oligonucleotide
ctgggtttggagtgcagggc

SEQ ID NO: 7545 - DNA, 20 bp, Artificial Sequence
  Description of Artificial Sequence: Synthetic oligonucleotide
tgggtttggagtgcagggca

SEQ ID NO: 7546 - DNA, 20 bp, Artificial Sequence
  Description of Artificial Sequence: Synthetic oligonucleotide
gggtttggagtgcagggcat

SEQ ID NO: 7547 - DNA, 20 bp, Artificial Sequence
  Description of Artificial Sequence: Synthetic oligonucleotide
ggtttggagtgcagggcata

SEQ ID NO: 7548 - DNA, 20 bp, Artificial Sequence
  Description of Artificial Sequence: Synthetic oligonucleotide
gtttggagtgcagggcataa

SEQ ID NO: 7549 - DNA, 20 bp, Artificial Sequence
  Description of Artificial Sequence: Synthetic oligonucleotide
tttggagtgcagggcataaa

SEQ ID NO: 7550 - DNA, 20 bp, Artificial Sequence
  Description of Artificial Sequence: Synthetic oligonucleotide
ttggagtgcagggcataaac

SEQ ID NO: 7551 - DNA, 20 bp, Artificial Sequence
  Description of Artificial Sequence: Synthetic oligonucleotide
tggagtgcagggcataaact

SEQ ID NO: 7552 - DNA, 20 bp, Artificial Sequence
  Description of Artificial Sequence: Synthetic oligonucleotide
ggagtgcagggcataaactg

SEQ ID NO: 7553 - DNA, 20 bp, Artificial Sequence
  Description of Artificial Sequence: Synthetic oligonucleotide
gagtgcagggcataaactga

SEQ ID NO: 7554 - DNA, 20 bp, Artificial Sequence
  Description of Artificial Sequence: Synthetic oligonucleotide
agtgcagggcataaactgag

SEQ ID NO: 7555 - DNA, 20 bp, Artificial Sequence
  Description of Artificial Sequence: Synthetic oligonucleotide
gtgcagggcataaactgagt

SEQ ID NO: 7556 - DNA, 20 bp, Artificial Sequence
  Description of Artificial Sequence: Synthetic oligonucleotide
tgcagggcataaactgagtg

SEQ ID NO: 7557 - DNA, 20 bp, Artificial Sequence
  Description of Artificial Sequence: Synthetic oligonucleotide
gcagggcataaactgagtgt

SEQ ID NO: 7558 - DNA, 20 bp, Artificial Sequence
  Description of Artificial Sequence: Synthetic oligonucleotide
cagggcataaactgagtgtt

SEQ ID NO: 7559 - DNA, 20 bp, Artificial Sequence
  Description of Artificial Sequence: Synthetic oligonucleotide
agggcataaactgagtgttt

SEQ ID NO: 7560 - DNA, 20 bp, Artificial Sequence
  Description of Artificial Sequence: Synthetic oligonucleotide
gggcataaactgagtgtttg

SEQ ID NO: 7561 - DNA, 20 bp, Artificial Sequence
  Description of Artificial Sequence: Synthetic oligonucleotide
ggcataaactgagtgtttgc

SEQ ID NO: 7562 - DNA, 20 bp, Artificial Sequence
  Description of Artificial Sequence: Synthetic oligonucleotide
gcataaactgagtgtttgca

SEQ ID NO: 7563 - DNA, 20 bp, Artificial Sequence
  Description of Artificial Sequence: Synthetic oligonucleotide
cataaactgagtgtttgcat

SEQ ID NO: 7564 - DNA, 20 bp, Artificial Sequence
  Description of Artificial Sequence: Synthetic oligonucleotide
ataaactgagtgtttgcata

SEQ ID NO: 7565 - DNA, 20 bp, Artificial Sequence
  Description of Artificial Sequence: Synthetic oligonucleotide
taaactgagtgtttgcatag

SEQ ID NO: 7566 - DNA, 20 bp, Artificial Sequence
  Description of Artificial Sequence: Synthetic oligonucleotide
aaactgagtgtttgcatagc

SEQ ID NO: 7567 - DNA, 20 bp, Artificial Sequence
  Description of Artificial Sequence: Synthetic oligonucleotide
aactgagtgtttgcatagct

SEQ ID NO: 7568 - DNA, 20 bp, Artificial Sequence
  Description of Artificial Sequence: Synthetic oligonucleotide
actgagtgtttgcatagctc

SEQ ID NO: 7569 - DNA, 20 bp, Artificial Sequence
  Description of Artificial Sequence: Synthetic oligonucleotide
ctgagtgtttgcatagctct

SEQ ID NO: 7570 - DNA, 20 bp, Artificial Sequence
  Description of Artificial Sequence: Synthetic oligonucleotide
tgagtgtttgcatagctctg

SEQ ID NO: 7571 - DNA, 20 bp, Artificial Sequence
  Description of Artificial Sequence: Synthetic oligonucleotide
gagtgtttgcatagctctgt

SEQ ID NO: 7572 - DNA, 20 bp, Artificial Sequence
  Description of Artificial Sequence: Synthetic oligonucleotide
agtgtttgcatagctctgtg

SEQ ID NO: 7573 - DNA, 20 bp, Artificial Sequence
  Description of Artificial Sequence: Synthetic oligonucleotide
gtgtttgcatagctctgtgg

SEQ ID NO: 7574 - DNA, 20 bp, Artificial Sequence
  Description of Artificial Sequence: Synthetic oligonucleotide
tgtttgcatagctctgtggt

SEQ ID NO: 7575 - DNA, 20 bp, Artificial Sequence
  Description of Artificial Sequence: Synthetic oligonucleotide
gtttgcatagctctgtggtg

SEQ ID NO: 7576 - DNA, 20 bp, Artificial Sequence
  Description of Artificial Sequence: Synthetic oligonucleotide
tttgcatagctctgtggtgt

SEQ ID NO: 7577 - DNA, 20 bp, Artificial Sequence
  Description of Artificial Sequence: Synthetic oligonucleotide
ttgcatagctctgtggtgtt

SEQ ID NO: 7578 - DNA, 20 bp, Artificial Sequence
  Description of Artificial Sequence: Synthetic oligonucleotide
tgcatagctctgtggtgttt

SEQ ID NO: 7579 - DNA, 20 bp, Artificial Sequence
  Description of Artificial Sequence: Synthetic oligonucleotide
gcatagctctgtggtgtttg

SEQ ID NO: 7580 - DNA, 20 bp, Artificial Sequence
  Description of Artificial Sequence: Synthetic oligonucleotide
catagctctgtggtgtttgg

SEQ ID NO: 7581 - DNA, 20 bp, Artificial Sequence
  Description of Artificial Sequence: Synthetic oligonucleotide
atagctctgtggtgtttggt

SEQ ID NO: 7582 - DNA, 20 bp, Artificial Sequence
  Description of Artificial Sequence: Synthetic oligonucleotide
tagctctgtggtgtttggtg

SEQ ID NO: 7583 - DNA, 20 bp, Artificial Sequence
  Description of Artificial Sequence: Synthetic oligonucleotide
agctctgtggtgtttggtgt

SEQ ID NO: 7584 - DNA, 20 bp, Artificial Sequence
  Description of Artificial Sequence: Synthetic oligonucleotide
gctctgtggtgtttggtgtg

SEQ ID NO: 7585 - DNA, 20 bp, Artificial Sequence
  Description of Artificial Sequence: Synthetic oligonucleotide
ctctgtggtgtttggtgtgt

SEQ ID NO: 7586 - DNA, 20 bp, Artificial Sequence
  Description of Artificial Sequence: Synthetic oligonucleotide
tctgtggtgtttggtgtgtt

SEQ ID NO: 7587 - DNA, 20 bp, Artificial Sequence
  Description of Artificial Sequence: Synthetic oligonucleotide
ctgtggtgtttggtgtgttt

SEQ ID NO: 7588 - DNA, 20 bp, Artificial Sequence
  Description of Artificial Sequence: Synthetic oligonucleotide
tgtggtgtttggtgtgtttg

SEQ ID NO: 7589 - DNA, 20 bp, Artificial Sequence
  Description of Artificial Sequence: Synthetic oligonucleotide
gtggtgtttggtgtgtttgc

SEQ ID NO: 7590 - DNA, 20 bp, Artificial Sequence
  Description of Artificial Sequence: Synthetic oligonucleotide
tggtgtttggtgtgtttgct

SEQ ID NO: 7591 - DNA, 20 bp, Artificial Sequence
  Description of Artificial Sequence: Synthetic oligonucleotide
ggtgtttggtgtgtttgctt

SEQ ID NO: 7592 - DNA, 20 bp, Artificial Sequence
  Description of Artificial Sequence: Synthetic oligonucleotide
gtgtttggtgtgtttgcttg

SEQ ID NO: 7593 - DNA, 20 bp, Artificial Sequence
  Description of Artificial Sequence: Synthetic oligonucleotide
tgtttggtgtgtttgcttgt

SEQ ID NO: 7594 - DNA, 20 bp, Artificial Sequence
  Description of Artificial Sequence: Synthetic oligonucleotide
gtttggtgtgtttgcttgtg

SEQ ID NO: 7595 - DNA, 20 bp, Artificial Sequence
  Description of Artificial Sequence: Synthetic oligonucleotide
tttggtgtgtttgcttgtgt

SEQ ID NO: 7596 - DNA, 20 bp, Artificial Sequence
  Description of Artificial Sequence: Synthetic oligonucleotide
ttggtgtgtttgcttgtgtt

SEQ ID NO: 7597 - DNA, 20 bp, Artificial Sequence
  Description of Artificial Sequence: Synthetic oligonucleotide
tggtgtgtttgcttgtgttt

SEQ ID NO: 7598 - DNA, 20 bp, Artificial Sequence
  Description of Artificial Sequence: Synthetic oligonucleotide
ggtgtgtttgcttgtgtttg

SEQ ID NO: 7599 - DNA, 20 bp, Artificial Sequence
  Description of Artificial Sequence: Synthetic oligonucleotide
gtgtgtttgcttgtgtttga

SEQ ID NO: 7600 - DNA, 20 bp, Artificial Sequence
  Description of Artificial Sequence: Synthetic oligonucleotide
tgtgtttgcttgtgtttgag

SEQ ID NO: 7601 - DNA, 20 bp, Artificial Sequence
  Description of Artificial Sequence: Synthetic oligonucleotide
gtgtttgcttgtgtttgagt

SEQ ID NO: 7602 - DNA, 20 bp, Artificial Sequence
  Description of Artificial Sequence: Synthetic oligonucleotide
tgtttgcttgtgtttgagtt

SEQ ID NO: 7603 - DNA, 20 bp, Artificial Sequence
  Description of Artificial Sequence: Synthetic oligonucleotide
gtttgcttgtgtttgagttt

SEQ ID NO: 7604 - DNA, 20 bp, Artificial Sequence
  Description of Artificial Sequence: Synthetic oligonucleotide
tttgcttgtgtttgagtttt

SEQ ID NO: 7605 - DNA, 20 bp, Artificial Sequence
  Description of Artificial Sequence: Synthetic oligonucleotide
ttgcttgtgtttgagttttc

SEQ ID NO: 7606 - DNA, 20 bp, Artificial Sequence
  Description of Artificial Sequence: Synthetic oligonucleotide
tgcttgtgtttgagttttcc

SEQ ID NO: 7607 - DNA, 20 bp, Artificial Sequence
  Description of Artificial Sequence: Synthetic oligonucleotide
gcttgtgtttgagttttcct

SEQ ID NO: 7608 - DNA, 20 bp, Artificial Sequence
  Description of Artificial Sequence: Synthetic oligonucleotide
cttgtgtttgagttttcctt

SEQ ID NO: 7609 - DNA, 20 bp, Artificial Sequence
  Description of Artificial Sequence: Synthetic oligonucleotide
ttgtgtttgagttttccttt

SEQ ID NO: 7610 - DNA, 20 bp, Artificial Sequence
  Description of Artificial Sequence: Synthetic oligonucleotide
tgtgtttgagttttcctttt

SEQ ID NO: 7611 - DNA, 20 bp, Artificial Sequence
  Description of Artificial Sequence: Synthetic oligonucleotide
gtgtttgagttttccttttt

SEQ ID NO: 7612 - DNA, 20 bp, Artificial Sequence
  Description of Artificial Sequence: Synthetic oligonucleotide
tgtttgagttttcctttttt

SEQ ID NO: 7613 - DNA, 20 bp, Artificial Sequence
  Description of Artificial Sequence: Synthetic oligonucleotide
gtttgagttttccttttttt

SEQ ID NO: 7614 - DNA, 20 bp, Artificial Sequence
  Description of Artificial Sequence: Synthetic oligonucleotide
tttgagttttcctttttttt

SEQ ID NO: 7615 - DNA, 20 bp, Artificial Sequence
  Description of Artificial Sequence: Synthetic oligonucleotide
ttgagttttccttttttttt

SEQ ID NO: 7616 - DNA, 20 bp, Artificial Sequence
  Description of Artificial Sequence: Synthetic oligonucleotide
tgagttttcctttttttttt

SEQ ID NO: 7617 - DNA, 20 bp, Artificial Sequence
  Description of Artificial Sequence: Synthetic oligonucleotide
gagttttccttttttttttt

SEQ ID NO: 7618 - DNA, 20 bp, Artificial Sequence
  Description of Artificial Sequence: Synthetic oligonucleotide
agttttcctttttttttttt

SEQ ID NO: 7619 - DNA, 20 bp, Artificial Sequence
  Description of Artificial Sequence: Synthetic oligonucleotide
gttttccttttttttttttt

SEQ ID NO: 7620 - DNA, 20 bp, Artificial Sequence
  Description of Artificial Sequence: Synthetic oligonucleotide
ttttcctttttttttttttt

SEQ ID NO: 7621 - DNA, 20 bp, Artificial Sequence
  Description of Artificial Sequence: Synthetic oligonucleotide
tttccttttttttttttttt

SEQ ID NO: 7622 - DNA, 20 bp, Artificial Sequence
  Description of Artificial Sequence: Synthetic oligonucleotide
ttcctttttttttttttttt

SEQ ID NO: 7623 - DNA, 20 bp, Artificial Sequence
  Description of Artificial Sequence: Synthetic oligonucleotide
tccttttttttttttttttt

SEQ ID NO: 7624 - DNA, 20 bp, Artificial Sequence
  Description of Artificial Sequence: Synthetic oligonucleotide
cctttttttttttttttttt

SEQ ID NO: 7625 - DNA, 20 bp, Artificial Sequence
  Description of Artificial Sequence: Synthetic oligonucleotide
cttttttttttttttttttt

SEQ ID NO: 7626 - DNA, 20 bp, Artificial Sequence
  Description of Artificial Sequence: Synthetic oligonucleotide
tttttttttttttttttttt

SEQ ID NO: 7627 - DNA, 20 bp, Artificial Sequence
  Description of Artificial Sequence: Synthetic oligonucleotide
ttttttttttttttttttta

SEQ ID NO: 7628 - DNA, 20 bp, Artificial Sequence
  Description of Artificial Sequence: Synthetic oligonucleotide
ttttttttttttttttttaa

SEQ ID NO: 7629 - DNA, 20 bp, Artificial Sequence
  Description of Artificial Sequence: Synthetic oligonucleotide
tttttttttttttttttaat

SEQ ID NO: 7630 - DNA, 20 bp, Artificial Sequence
  Description of Artificial Sequence: Synthetic oligonucleotide
ttttttttttttttttaatt

SEQ ID NO: 7631 - DNA, 20 bp, Artificial Sequence
  Description of Artificial Sequence: Synthetic oligonucleotide
tttttttttttttttaattg

SEQ ID NO: 7632 - DNA, 20 bp, Artificial Sequence
  Description of Artificial Sequence: Synthetic oligonucleotide
ttttttttttttttaattga

SEQ ID NO: 7633 - DNA, 20 bp, Artificial Sequence
  Description of Artificial Sequence: Synthetic oligonucleotide
tttttttttttttaattgaa

SEQ ID NO: 7634 - DNA, 20 bp, Artificial Sequence
  Description of Artificial Sequence: Synthetic oligonucleotide
ttttttttttttaattgaaa

SEQ ID NO: 7635 - DNA, 20 bp, Artificial Sequence
  Description of Artificial Sequence: Synthetic oligonucleotide
tttttttttttaattgaaat

SEQ ID NO: 7636 - DNA, 20 bp, Artificial Sequence
  Description of Artificial Sequence: Synthetic oligonucleotide
ttttttttttaattgaaatg

SEQ ID NO: 7637 - DNA, 20 bp, Artificial Sequence
  Description of Artificial Sequence: Synthetic oligonucleotide
tttttttttaattgaaatgg

SEQ ID NO: 7638 - DNA, 20 bp, Artificial Sequence
  Description of Artificial Sequence: Synthetic oligonucleotide
ttttttttaattgaaatgga

SEQ ID NO: 7639 - DNA, 20 bp, Artificial Sequence
  Description of Artificial Sequence: Synthetic oligonucleotide
tttttttaattgaaatggag

SEQ ID NO: 7640 - DNA, 20 bp, Artificial Sequence
  Description of Artificial Sequence: Synthetic oligonucleotide
ttttttaattgaaatggagt

SEQ ID NO: 7641 - DNA, 20 bp, Artificial Sequence
  Description of Artificial Sequence: Synthetic oligonucleotide
tttttaattgaaatggagtc

SEQ ID NO: 7642 - DNA, 20 bp, Artificial Sequence
  Description of Artificial Sequence: Synthetic oligonucleotide
ttttaattgaaatggagtct

SEQ ID NO: 7643 - DNA, 20 bp, Artificial Sequence
  Description of Artificial Sequence: Synthetic oligonucleotide
tttaattgaaatggagtctc

SEQ ID NO: 7644 - DNA, 20 bp, Artificial Sequence
  Description of Artificial Sequence: Synthetic oligonucleotide
ttaattgaaatggagtctca

SEQ ID NO: 7645 - DNA, 20 bp, Artificial Sequence
  Description of Artificial Sequence: Synthetic oligonucleotide
taattgaaatggagtctcac

SEQ ID NO: 7646 - DNA, 20 bp, Artificial Sequence
  Description of Artificial Sequence: Synthetic oligonucleotide
aattgaaatggagtctcact

SEQ ID NO: 7647 - DNA, 20 bp, Artificial Sequence
  Description of Artificial Sequence: Synthetic oligonucleotide
attgaaatggagtctcactt

SEQ ID NO: 7648 - DNA, 20 bp, Artificial Sequence
  Description of Artificial Sequence: Synthetic oligonucleotide
ttgaaatggagtctcacttt

SEQ ID NO: 7649 - DNA, 20 bp, Artificial Sequence
  Description of Artificial Sequence: Synthetic oligonucleotide
tgaaatggagtctcactttg

SEQ ID NO: 7650 - DNA, 20 bp, Artificial Sequence
  Description of Artificial Sequence: Synthetic oligonucleotide
gaaatggagtctcactttgt

SEQ ID NO: 7651 - DNA, 20 bp, Artificial Sequence
  Description of Artificial Sequence: Synthetic oligonucleotide
aaatggagtctcactttgtc

SEQ ID NO: 7652 - DNA, 20 bp, Artificial Sequence
  Description of Artificial Sequence: Synthetic oligonucleotide
aatggagtctcactttgtct

SEQ ID NO: 7653 - DNA, 20 bp, Artificial Sequence
  Description of Artificial Sequence: Synthetic oligonucleotide
atggagtctcactttgtctc

SEQ ID NO: 7654 - DNA, 20 bp, Artificial Sequence
  Description of Artificial Sequence: Synthetic oligonucleotide
tggagtctcactttgtctcc

SEQ ID NO: 7655 - DNA, 20 bp, Artificial Sequence
  Description of Artificial Sequence: Synthetic oligonucleotide
ggagtctcactttgtctccc

SEQ ID NO: 7656 - DNA, 20 bp, Artificial Sequence
  Description of Artificial Sequence: Synthetic oligonucleotide
gagtctcactttgtctccca

SEQ ID NO: 7657 - DNA, 20 bp, Artificial Sequence
  Description of Artificial Sequence: Synthetic oligonucleotide
agtctcactttgtctcccag

SEQ ID NO: 7658 - DNA, 20 bp, Artificial Sequence
  Description of Artificial Sequence: Synthetic oligonucleotide
gtctcactttgtctcccaga

SEQ ID NO: 7659 - DNA, 20 bp, Artificial Sequence
  Description of Artificial Sequence: Synthetic oligonucleotide
tctcactttgtctcccagat

SEQ ID NO: 7660 - DNA, 20 bp, Artificial Sequence
  Description of Artificial Sequence: Synthetic oligonucleotide
ctcactttgtctcccagatt

SEQ ID NO: 7661 - DNA, 20 bp, Artificial Sequence
  Description of Artificial Sequence: Synthetic oligonucleotide
tcactttgtctcccagatta

SEQ ID NO: 7662 - DNA, 20 bp, Artificial Sequence
  Description of Artificial Sequence: Synthetic oligonucleotide
cactttgtctcccagattat

SEQ ID NO: 7663 - DNA, 20 bp, Artificial Sequence
  Description of Artificial Sequence: Synthetic oligonucleotide
actttgtctcccagattata

SEQ ID NO: 7664 - DNA, 20 bp, Artificial Sequence
  Description of Artificial Sequence: Synthetic oligonucleotide
ctttgtctcccagattatag

SEQ ID NO: 7665 - DNA, 20 bp, Artificial Sequence
  Description of Artificial Sequence: Synthetic oligonucleotide
tttgtctcccagattatagt

SEQ ID NO: 7666 - DNA, 20 bp, Artificial Sequence
  Description of Artificial Sequence: Synthetic oligonucleotide
ttgtctcccagattatagtg

SEQ ID NO: 7667 - DNA, 20 bp, Artificial Sequence
  Description of Artificial Sequence: Synthetic oligonucleotide
tgtctcccagattatagtgc

SEQ ID NO: 7668 - DNA, 20 bp, Artificial Sequence
  Description of Artificial Sequence: Synthetic oligonucleotide
gtctcccagattatagtgca

SEQ ID NO: 7669 - DNA, 20 bp, Artificial Sequence
  Description of Artificial Sequence: Synthetic oligonucleotide
tctcccagattatagtgcag

SEQ ID NO: 7670 - DNA, 20 bp, Artificial Sequence
  Description of Artificial Sequence: Synthetic oligonucleotide
ctcccagattatagtgcagt

SEQ ID NO: 7671 - DNA, 20 bp, Artificial Sequence
  Description of Artificial Sequence: Synthetic oligonucleotide
tcccagattatagtgcagtg

SEQ ID NO: 7672 - DNA, 20 bp, Artificial Sequence
  Description of Artificial Sequence: Synthetic oligonucleotide
cccagattatagtgcagtgg

SEQ ID NO: 7673 - DNA, 20 bp, Artificial Sequence
  Description of Artificial Sequence: Synthetic oligonucleotide
ccagattatagtgcagtggc

SEQ ID NO: 7674 - DNA, 20 bp, Artificial Sequence
  Description of Artificial Sequence: Synthetic oligonucleotide
cagattatagtgcagtggcg

SEQ ID NO: 7675 - DNA, 20 bp, Artificial Sequence
  Description of Artificial Sequence: Synthetic oligonucleotide
agattatagtgcagtggcgt

SEQ ID NO: 7676 - DNA, 20 bp, Artificial Sequence
  Description of Artificial Sequence: Synthetic oligonucleotide
gattatagtgcagtggcgtg

SEQ ID NO: 7677 - DNA, 20 bp, Artificial Sequence
  Description of Artificial Sequence: Synthetic oligonucleotide
attatagtgcagtggcgtga

SEQ ID NO: 7678 - DNA, 20 bp, Artificial Sequence
  Description of Artificial Sequence: Synthetic oligonucleotide
ttatagtgcagtggcgtgat

SEQ ID NO: 7679 - DNA, 20 bp, Artificial Sequence
  Description of Artificial Sequence: Synthetic oligonucleotide
tatagtgcagtggcgtgatc

SEQ ID NO: 7680 - DNA, 20 bp, Artificial Sequence
  Description of Artificial Sequence: Synthetic oligonucleotide
atagtgcagtggcgtgatct

SEQ ID NO: 7681 - DNA, 20 bp, Artificial Sequence
  Description of Artificial Sequence: Synthetic oligonucleotide
tagtgcagtggcgtgatctc

SEQ ID NO: 7682 - DNA, 20 bp, Artificial Sequence
  Description of Artificial Sequence: Synthetic oligonucleotide
agtgcagtggcgtgatctcg

SEQ ID NO: 7683 - DNA, 20 bp, Artificial Sequence
  Description of Artificial Sequence: Synthetic oligonucleotide
gtgcagtggcgtgatctcgg

SEQ ID NO: 7684 - DNA, 20 bp, Artificial Sequence
  Description of Artificial Sequence: Synthetic oligonucleotide
tgcagtggcgtgatctcggc

SEQ ID NO: 7685 - DNA, 20 bp, Artificial Sequence
  Description of Artificial Sequence: Synthetic oligonucleotide
gcagtggcgtgatctcggct

SEQ ID NO: 7686 - DNA, 20 bp, Artificial Sequence
  Description of Artificial Sequence: Synthetic oligonucleotide
cagtggcgtgatctcggctc

SEQ ID NO: 7687 - DNA, 20 bp, Artificial Sequence
  Description of Artificial Sequence: Synthetic oligonucleotide
agtggcgtgatctcggctca

SEQ ID NO: 7688 - DNA, 20 bp, Artificial Sequence
  Description of Artificial Sequence: Synthetic oligonucleotide
gtggcgtgatctcggctcac

SEQ ID NO: 7689 - DNA, 20 bp, Artificial Sequence
  Description of Artificial Sequence: Synthetic oligonucleotide
tggcgtgatctcggctcact

SEQ ID NO: 7690 - DNA, 20 bp, Artificial Sequence
  Description of Artificial Sequence: Synthetic oligonucleotide
ggcgtgatctcggctcactg

SEQ ID NO: 7691 - DNA, 20 bp, Artificial Sequence
  Description of Artificial Sequence: Synthetic oligonucleotide
gcgtgatctcggctcactgc

SEQ ID NO: 7692 - DNA, 20 bp, Artificial Sequence
  Description of Artificial Sequence: Synthetic oligonucleotide
cgtgatctcggctcactgca

SEQ ID NO: 7693 - DNA, 20 bp, Artificial Sequence
  Description of Artificial Sequence: Synthetic oligonucleotide
gtgatctcggctcactgcaa

SEQ ID NO: 7694 - DNA, 20 bp, Artificial Sequence
  Description of Artificial Sequence: Synthetic oligonucleotide
tgatctcggctcactgcaac

SEQ ID NO: 7695 - DNA, 20 bp, Artificial Sequence
  Description of Artificial Sequence: Synthetic oligonucleotide
gatctcggctcactgcaacc

SEQ ID NO: 7696 - DNA, 20 bp, Artificial Sequence
  Description of Artificial Sequence: Synthetic oligonucleotide
atctcggctcactgcaacct

SEQ ID NO: 7697 - DNA, 20 bp, Artificial Sequence
  Description of Artificial Sequence: Synthetic oligonucleotide
tctcggctcactgcaacctc

SEQ ID NO: 7698 - DNA, 20 bp, Artificial Sequence
  Description of Artificial Sequence: Synthetic oligonucleotide
ctcggctcactgcaacctct

SEQ ID NO: 7699 - DNA, 20 bp, Artificial Sequence
  Description of Artificial Sequence: Synthetic oligonucleotide
tcggctcactgcaacctctg

SEQ ID NO: 7700 - DNA, 20 bp, Artificial Sequence
  Description of Artificial Sequence: Synthetic oligonucleotide
cggctcactgcaacctctgc

SEQ ID NO: 7701 - DNA, 20 bp, Artificial Sequence
  Description of Artificial Sequence: Synthetic oligonucleotide
ggctcactgcaacctctgcc

SEQ ID NO: 7702 - DNA, 20 bp, Artificial Sequence
  Description of Artificial Sequence: Synthetic oligonucleotide
gctcactgcaacctctgcct

SEQ ID NO: 7703 - DNA, 20 bp, Artificial Sequence
  Description of Artificial Sequence: Synthetic oligonucleotide
ctcactgcaacctctgcctc

SEQ ID NO: 7704 - DNA, 20 bp, Artificial Sequence
  Description of Artificial Sequence: Synthetic oligonucleotide
tcactgcaacctctgcctcc

SEQ ID NO: 7705 - DNA, 20 bp, Artificial Sequence
  Description of Artificial Sequence: Synthetic oligonucleotide
cactgcaacctctgcctcct

SEQ ID NO: 7706 - DNA, 20 bp, Artificial Sequence
  Description of Artificial Sequence: Synthetic oligonucleotide
actgcaacctctgcctcctg

SEQ ID NO: 7707 - DNA, 20 bp, Artificial Sequence
  Description of Artificial Sequence: Synthetic oligonucleotide
ctgcaacctctgcctcctga

SEQ ID NO: 7708 - DNA, 20 bp, Artificial Sequence
  Description of Artificial Sequence: Synthetic oligonucleotide
tgcaacctctgcctcctgag

SEQ ID NO: 7709 - DNA, 20 bp, Artificial Sequence
  Description of Artificial Sequence: Synthetic oligonucleotide
gcaacctctgcctcctgagt

SEQ ID NO: 7710 - DNA, 20 bp, Artificial Sequence
  Description of Artificial Sequence: Synthetic oligonucleotide
caacctctgcctcctgagtt

SEQ ID NO: 7711 - DNA, 20 bp, Artificial Sequence
  Description of Artificial Sequence: Synthetic oligonucleotide
aacctctgcctcctgagttc

SEQ ID NO: 7712 - DNA, 20 bp, Artificial Sequence
  Description of Artificial Sequence: Synthetic oligonucleotide
acctctgcctcctgagttca

SEQ ID NO: 7713 - DNA, 20 bp, Artificial Sequence
  Description of Artificial Sequence: Synthetic oligonucleotide
cctctgcctcctgagttcaa

SEQ ID NO: 7714 - DNA, 20 bp, Artificial Sequence
  Description of Artificial Sequence: Synthetic oligonucleotide
ctctgcctcctgagttcaag

SEQ ID NO: 7715 - DNA, 20 bp, Artificial Sequence
  Description of Artificial Sequence: Synthetic oligonucleotide
tctgcctcctgagttcaagc

SEQ ID NO: 7716 - DNA, 20 bp, Artificial Sequence
  Description of Artificial Sequence: Synthetic oligonucleotide
ctgcctcctgagttcaagca

SEQ ID NO: 7717 - DNA, 20 bp, Artificial Sequence
  Description of Artificial Sequence: Synthetic oligonucleotide
tgcctcctgagttcaagcaa

SEQ ID NO: 7718 - DNA, 20 bp, Artificial Sequence
  Description of Artificial Sequence: Synthetic oligonucleotide
gcctcctgagttcaagcaat

SEQ ID NO: 7719 - DNA, 20 bp, Artificial Sequence
  Description of Artificial Sequence: Synthetic oligonucleotide
cctcctgagttcaagcaatc

SEQ ID NO: 7720 - DNA, 20 bp, Artificial Sequence
  Description of Artificial Sequence: Synthetic oligonucleotide
ctcctgagttcaagcaatcc

SEQ ID NO: 7721 - DNA, 20 bp, Artificial Sequence
  Description of Artificial Sequence: Synthetic oligonucleotide
tcctgagttcaagcaatcct

SEQ ID NO: 7722 - DNA, 20 bp, Artificial Sequence
  Description of Artificial Sequence: Synthetic oligonucleotide
cctgagttcaagcaatcctc

SEQ ID NO: 7723 - DNA, 20 bp, Artificial Sequence
  Description of Artificial Sequence: Synthetic oligonucleotide
ctgagttcaagcaatcctcc

SEQ ID NO: 7724 - DNA, 20 bp, Artificial Sequence
  Description of Artificial Sequence: Synthetic oligonucleotide
tgagttcaagcaatcctcct

SEQ ID NO: 7725 - DNA, 20 bp, Artificial Sequence
  Description of Artificial Sequence: Synthetic oligonucleotide
gagttcaagcaatcctcctg

SEQ ID NO: 7726 - DNA, 20 bp, Artificial Sequence
  Description of Artificial Sequence: Synthetic oligonucleotide
agttcaagcaatcctcctgt

SEQ ID NO: 7727 - DNA, 20 bp, Artificial Sequence
  Description of Artificial Sequence: Synthetic oligonucleotide
gttcaagcaatcctcctgtg

SEQ ID NO: 7728 - DNA, 20 bp, Artificial Sequence
  Description of Artificial Sequence: Synthetic oligonucleotide
ttcaagcaatcctcctgtgt

SEQ ID NO: 7729 - DNA, 20 bp, Artificial Sequence
  Description of Artificial Sequence: Synthetic oligonucleotide
tcaagcaatcctcctgtgta

SEQ ID NO: 7730 - DNA, 20 bp, Artificial Sequence
  Description of Artificial Sequence: Synthetic oligonucleotide
caagcaatcctcctgtgtag

SEQ ID NO: 7731 - DNA, 20 bp, Artificial Sequence
  Description of Artificial Sequence: Synthetic oligonucleotide
aagcaatcctcctgtgtagc

SEQ ID NO: 7732 - DNA, 20 bp, Artificial Sequence
  Description of Artificial Sequence: Synthetic oligonucleotide
agcaatcctcctgtgtagca

SEQ ID NO: 7733 - DNA, 20 bp, Artificial Sequence
  Description of Artificial Sequence: Synthetic oligonucleotide
gcaatcctcctgtgtagcag

SEQ ID NO: 7734 - DNA, 20 bp, Artificial Sequence
  Description of Artificial Sequence: Synthetic oligonucleotide
caatcctcctgtgtagcagg

SEQ ID NO: 7735 - DNA, 20 bp, Artificial Sequence
  Description of Artificial Sequence: Synthetic oligonucleotide
aatcctcctgtgtagcaggg

SEQ ID NO: 7736 - DNA, 20 bp, Artificial Sequence
  Description of Artificial Sequence: Synthetic oligonucleotide
atcctcctgtgtagcaggga

SEQ ID NO: 7737 - DNA, 20 bp, Artificial Sequence
  Description of Artificial Sequence: Synthetic oligonucleotide
tcctcctgtgtagcagggat

SEQ ID NO: 7738 - DNA, 20 bp, Artificial Sequence
  Description of Artificial Sequence: Synthetic oligonucleotide
cctcctgtgtagcagggatt

SEQ ID NO: 7739 - DNA, 20 bp, Artificial Sequence
  Description of Artificial Sequence: Synthetic oligonucleotide
ctcctgtgtagcagggatta

SEQ ID NO: 7740 - DNA, 20 bp, Artificial Sequence
  Description of Artificial Sequence: Synthetic oligonucleotide
tcctgtgtagcagggattac

SEQ ID NO: 7741 - DNA, 20 bp, Artificial Sequence
  Description of Artificial Sequence: Synthetic oligonucleotide
cctgtgtagcagggattaca

SEQ ID NO: 7742 - DNA, 20 bp, Artificial Sequence
  Description of Artificial Sequence: Synthetic oligonucleotide
ctgtgtagcagggattacag

SEQ ID NO: 7743 - DNA, 20 bp, Artificial Sequence
  Description of Artificial Sequence: Synthetic oligonucleotide
tgtgtagcagggattacagg

SEQ ID NO: 7744 - DNA, 20 bp, Artificial Sequence
  Description of Artificial Sequence: Synthetic oligonucleotide
gtgtagcagggattacaggt

SEQ ID NO: 7745 - DNA, 20 bp, Artificial Sequence
  Description of Artificial Sequence: Synthetic oligonucleotide
tgtagcagggattacaggtg

SEQ ID NO: 7746 - DNA, 20 bp, Artificial Sequence
  Description of Artificial Sequence: Synthetic oligonucleotide
gtagcagggattacaggtgc

SEQ ID NO: 7747 - DNA, 20 bp, Artificial Sequence
  Description of Artificial Sequence: Synthetic oligonucleotide
tagcagggattacaggtgcc

SEQ ID NO: 7748 - DNA, 20 bp, Artificial Sequence
  Description of Artificial Sequence: Synthetic oligonucleotide
agcagggattacaggtgccc

SEQ ID NO: 7749 - DNA, 20 bp, Artificial Sequence
  Description of Artificial Sequence: Synthetic oligonucleotide
gcagggattacaggtgccca

SEQ ID NO: 7750 - DNA, 20 bp, Artificial Sequence
  Description of Artificial Sequence: Synthetic oligonucleotide
cagggattacaggtgcccac

SEQ ID NO: 7751 - DNA, 20 bp, Artificial Sequence
  Description of Artificial Sequence: Synthetic oligonucleotide
agggattacaggtgcccacc

SEQ ID NO: 7752 - DNA, 20 bp, Artificial Sequence
  Description of Artificial Sequence: Synthetic oligonucleotide
gggattacaggtgcccacca

SEQ ID NO: 7753 - DNA, 20 bp, Artificial Sequence
  Description of Artificial Sequence: Synthetic oligonucleotide
ggattacaggtgcccaccac

SEQ ID NO: 7754 - DNA, 20 bp, Artificial Sequence
  Description of Artificial Sequence: Synthetic oligonucleotide
gattacaggtgcccaccacc

SEQ ID NO: 7755 - DNA, 20 bp, Artificial Sequence
  Description of Artificial Sequence: Synthetic oligonucleotide
attacaggtgcccaccacca

SEQ ID NO: 7756 - DNA, 20 bp, Artificial Sequence
  Description of Artificial Sequence: Synthetic oligonucleotide
ttacaggtgcccaccaccat

SEQ ID NO: 7757 - DNA, 20 bp, Artificial Sequence
  Description of Artificial Sequence: Synthetic oligonucleotide
tacaggtgcccaccaccatg

SEQ ID NO: 7758 - DNA, 20 bp, Artificial Sequence
  Description of Artificial Sequence: Synthetic oligonucleotide
acaggtgcccaccaccatgc

SEQ ID NO: 7759 - DNA, 20 bp, Artificial Sequence
  Description of Artificial Sequence: Synthetic oligonucleotide
caggtgcccaccaccatgcc

SEQ ID NO: 7760 - DNA, 20 bp, Artificial Sequence
  Description of Artificial Sequence: Synthetic oligonucleotide
aggtgcccaccaccatgcct

SEQ ID NO: 7761 - DNA, 20 bp, Artificial Sequence
  Description of Artificial Sequence: Synthetic oligonucleotide
ggtgcccaccaccatgcctg

SEQ ID NO: 7762 - DNA, 20 bp, Artificial Sequence
  Description of Artificial Sequence: Synthetic oligonucleotide
gtgcccaccaccatgcctgg

SEQ ID NO: 7763 - DNA, 20 bp, Artificial Sequence
  Description of Artificial Sequence: Synthetic oligonucleotide
tgcccaccaccatgcctggc

SEQ ID NO: 7764 - DNA, 20 bp, Artificial Sequence
  Description of Artificial Sequence: Synthetic oligonucleotide
gcccaccaccatgcctggct

SEQ ID NO: 7765 - DNA, 20 bp, Artificial Sequence
  Description of Artificial Sequence: Synthetic oligonucleotide
cccaccaccatgcctggcta

SEQ ID NO: 7766 - DNA, 20 bp, Artificial Sequence
  Description of Artificial Sequence: Synthetic oligonucleotide
ccaccaccatgcctggctaa

SEQ ID NO: 7767 - DNA, 20 bp, Artificial Sequence
  Description of Artificial Sequence: Synthetic oligonucleotide
caccaccatgcctggctaat

SEQ ID NO: 7768 - DNA, 20 bp, Artificial Sequence
  Description of Artificial Sequence: Synthetic oligonucleotide
accaccatgcctggctaatt

SEQ ID NO: 7769 - DNA, 20 bp, Artificial Sequence
  Description of Artificial Sequence: Synthetic oligonucleotide
ccaccatgcctggctaattt

SEQ ID NO: 7770 - DNA, 20 bp, Artificial Sequence
  Description of Artificial Sequence: Synthetic oligonucleotide
caccatgcctggctaatttt

SEQ ID NO: 7771 - DNA, 20 bp, Artificial Sequence
  Description of Artificial Sequence: Synthetic oligonucleotide
accatgcctggctaattttt

SEQ ID NO: 7772 - DNA, 20 bp, Artificial Sequence
  Description of Artificial Sequence: Synthetic oligonucleotide
ccatgcctggctaatttttt

SEQ ID NO: 7773 - DNA, 20 bp, Artificial Sequence
  Description of Artificial Sequence: Synthetic oligonucleotide
catgcctggctaattttttt

SEQ ID NO: 7774 - DNA, 20 bp, Artificial Sequence
  Description of Artificial Sequence: Synthetic oligonucleotide
atgcctggctaatttttttg

SEQ ID NO: 7775 - DNA, 20 bp, Artificial Sequence
  Description of Artificial Sequence: Synthetic oligonucleotide
tgcctggctaatttttttgt

SEQ ID NO: 7776 - DNA, 20 bp, Artificial Sequence
  Description of Artificial Sequence: Synthetic oligonucleotide
gcctggctaatttttttgta

SEQ ID NO: 7777 - DNA, 20 bp, Artificial Sequence
  Description of Artificial Sequence: Synthetic oligonucleotide
cctggctaatttttttgtat

SEQ ID NO: 7778 - DNA, 20 bp, Artificial Sequence
  Description of Artificial Sequence: Synthetic oligonucleotide
ctggctaatttttttgtatt

SEQ ID NO: 7779 - DNA, 20 bp, Artificial Sequence
  Description of Artificial Sequence: Synthetic oligonucleotide
tggctaatttttttgtattt

SEQ ID NO: 7780 - DNA, 20 bp, Artificial Sequence
  Description of Artificial Sequence: Synthetic oligonucleotide
ggctaatttttttgtatttt

SEQ ID NO: 7781 - DNA, 20 bp, Artificial Sequence
  Description of Artificial Sequence: Synthetic oligonucleotide
gctaatttttttgtattttt

SEQ ID NO: 7782 - DNA, 20 bp, Artificial Sequence
  Description of Artificial Sequence: Synthetic oligonucleotide
ctaatttttttgtattttta

SEQ ID NO: 7783 - DNA, 20 bp, Artificial Sequence
  Description of Artificial Sequence: Synthetic oligonucleotide
taatttttttgtatttttag

SEQ ID NO: 7784 - DNA, 20 bp, Artificial Sequence
  Description of Artificial Sequence: Synthetic oligonucleotide
aatttttttgtatttttagt

SEQ ID NO: 7785 - DNA, 20 bp, Artificial Sequence
  Description of Artificial Sequence: Synthetic oligonucleotide
atttttttgtatttttagta

SEQ ID NO: 7786 - DNA, 20 bp, Artificial Sequence
  Description of Artificial Sequence: Synthetic oligonucleotide
tttttttgtatttttagtag

SEQ ID NO: 7787 - DNA, 20 bp, Artificial Sequence
  Description of Artificial Sequence: Synthetic oligonucleotide
ttttttgtatttttagtaga

SEQ ID NO: 7788 - DNA, 20 bp, Artificial Sequence
  Description of Artificial Sequence: Synthetic oligonucleotide
tttttgtatttttagtagag

SEQ ID NO: 7789 - DNA, 20 bp, Artificial Sequence
  Description of Artificial Sequence: Synthetic oligonucleotide
ttttgtatttttagtagaga

SEQ ID NO: 7790 - DNA, 20 bp, Artificial Sequence
  Description of Artificial Sequence: Synthetic oligonucleotide
tttgtatttttagtagagac

SEQ ID NO: 7791 - DNA, 20 bp, Artificial Sequence
  Description of Artificial Sequence: Synthetic oligonucleotide
ttgtatttttagtagagaca

SEQ ID NO: 7792 - DNA, 20 bp, Artificial Sequence
  Description of Artificial Sequence: Synthetic oligonucleotide
tgtatttttagtagagacag

SEQ ID NO: 7793 - DNA, 20 bp, Artificial Sequence
  Description of Artificial Sequence: Synthetic oligonucleotide
gtatttttagtagagacagg

SEQ ID NO: 7794 - DNA, 20 bp, Artificial Sequence
  Description of Artificial Sequence: Synthetic oligonucleotide
tatttttagtagagacaggg

SEQ ID NO: 7795 - DNA, 20 bp, Artificial Sequence
  Description of Artificial Sequence: Synthetic oligonucleotide
atttttagtagagacagggt

SEQ ID NO: 7796 - DNA, 20 bp, Artificial Sequence
  Description of Artificial Sequence: Synthetic oligonucleotide
tttttagtagagacagggtt

SEQ ID NO: 7797 - DNA, 20 bp, Artificial Sequence
  Description of Artificial Sequence: Synthetic oligonucleotide
ttttagtagagacagggttt

SEQ ID NO: 7798 - DNA, 20 bp, Artificial Sequence
  Description of Artificial Sequence: Synthetic oligonucleotide
tttagtagagacagggtttc

SEQ ID NO: 7799 - DNA, 20 bp, Artificial Sequence
  Description of Artificial Sequence: Synthetic oligonucleotide
ttagtagagacagggtttca

SEQ ID NO: 7800 - DNA, 20 bp, Artificial Sequence
  Description of Artificial Sequence: Synthetic oligonucleotide
tagtagagacagggtttcac

SEQ ID NO: 7801 - DNA, 20 bp, Artificial Sequence
  Description of Artificial Sequence: Synthetic oligonucleotide
agtagagacagggtttcacc

SEQ ID NO: 7802 - DNA, 20 bp, Artificial Sequence
  Description of Artificial Sequence: Synthetic oligonucleotide
gtagagacagggtttcacca

SEQ ID NO: 7803 - DNA, 20 bp, Artificial Sequence
  Description of Artificial Sequence: Synthetic oligonucleotide
tagagacagggtttcaccat

SEQ ID NO: 7804 - DNA, 20 bp, Artificial Sequence
  Description of Artificial Sequence: Synthetic oligonucleotide
agagacagggtttcaccatg

SEQ ID NO: 7805 - DNA, 20 bp, Artificial Sequence
  Description of Artificial Sequence: Synthetic oligonucleotide
gagacagggtttcaccatgt

SEQ ID NO: 7806 - DNA, 20 bp, Artificial Sequence
  Description of Artificial Sequence: Synthetic oligonucleotide
agacagggtttcaccatgtt

SEQ ID NO: 7807 - DNA, 20 bp, Artificial Sequence
  Description of Artificial Sequence: Synthetic oligonucleotide
gacagggtttcaccatgttg

SEQ ID NO: 7808 - DNA, 20 bp, Artificial Sequence
  Description of Artificial Sequence: Synthetic oligonucleotide
acagggtttcaccatgttgg

SEQ ID NO: 7809 - DNA, 20 bp, Artificial Sequence
  Description of Artificial Sequence: Synthetic oligonucleotide
cagggtttcaccatgttggc

SEQ ID NO: 7810 - DNA, 20 bp, Artificial Sequence
  Description of Artificial Sequence: Synthetic oligonucleotide
agggtttcaccatgttggcc

SEQ ID NO: 7811 - DNA, 20 bp, Artificial Sequence
  Description of Artificial Sequence: Synthetic oligonucleotide
gggtttcaccatgttggcca

SEQ ID NO: 7812 - DNA, 20 bp, Artificial Sequence
  Description of Artificial Sequence: Synthetic oligonucleotide
ggtttcaccatgttggccag

SEQ ID NO: 7813 - DNA, 20 bp, Artificial Sequence
  Description of Artificial Sequence: Synthetic oligonucleotide
gtttcaccatgttggccagg

SEQ ID NO: 7814 - DNA, 20 bp, Artificial Sequence
  Description of Artificial Sequence: Synthetic oligonucleotide
tttcaccatgttggccaggc

SEQ ID NO: 7815 - DNA, 20 bp, Artificial Sequence
  Description of Artificial Sequence: Synthetic oligonucleotide
ttcaccatgttggccaggct

SEQ ID NO: 7816 - DNA, 20 bp, Artificial Sequence
  Description of Artificial Sequence: Synthetic oligonucleotide
tcaccatgttggccaggctg

SEQ ID NO: 7817 - DNA, 20 bp, Artificial Sequence
  Description of Artificial Sequence: Synthetic oligonucleotide
caccatgttggccaggctgg

SEQ ID NO: 7818 - DNA, 20 bp, Artificial Sequence
  Description of Artificial Sequence: Synthetic oligonucleotide
accatgttggccaggctggt

SEQ ID NO: 7819 - DNA, 20 bp, Artificial Sequence
  Description of Artificial Sequence: Synthetic oligonucleotide
ccatgttggccaggctggtc

SEQ ID NO: 7820 - DNA, 20 bp, Artificial Sequence
  Description of Artificial Sequence: Synthetic oligonucleotide
catgttggccaggctggtct

SEQ ID NO: 7821 - DNA, 20 bp, Artificial Sequence
  Description of Artificial Sequence: Synthetic oligonucleotide
atgttggccaggctggtctt

SEQ ID NO: 7822 - DNA, 20 bp, Artificial Sequence
  Description of Artificial Sequence: Synthetic oligonucleotide
tgttggccaggctggtctta

SEQ ID NO: 7823 - DNA, 20 bp, Artificial Sequence
  Description of Artificial Sequence: Synthetic oligonucleotide
gttggccaggctggtcttaa

SEQ ID NO: 7824 - DNA, 20 bp, Artificial Sequence
  Description of Artificial Sequence: Synthetic oligonucleotide
ttggccaggctggtcttaaa

SEQ ID NO: 7825 - DNA, 20 bp, Artificial Sequence
  Description of Artificial Sequence: Synthetic oligonucleotide
tggccaggctggtcttaaac

SEQ ID NO: 7826 - DNA, 20 bp, Artificial Sequence
  Description of Artificial Sequence: Synthetic oligonucleotide
ggccaggctggtcttaaact

SEQ ID NO: 7827 - DNA, 20 bp, Artificial Sequence
  Description of Artificial Sequence: Synthetic oligonucleotide
gccaggctggtcttaaactc

SEQ ID NO: 7828 - DNA, 20 bp, Artificial Sequence
  Description of Artificial Sequence: Synthetic oligonucleotide
ccaggctggtcttaaactcc

SEQ ID NO: 7829 - DNA, 20 bp, Artificial Sequence
  Description of Artificial Sequence: Synthetic oligonucleotide
caggctggtcttaaactcct

SEQ ID NO: 7830 - DNA, 20 bp, Artificial Sequence
  Description of Artificial Sequence: Synthetic oligonucleotide
aggctggtcttaaactcctg

SEQ ID NO: 7831 - DNA, 20 bp, Artificial Sequence
  Description of Artificial Sequence: Synthetic oligonucleotide
ggctggtcttaaactcctga

SEQ ID NO: 7832 - DNA, 20 bp, Artificial Sequence
  Description of Artificial Sequence: Synthetic oligonucleotide
gctggtcttaaactcctgac

SEQ ID NO: 7833 - DNA, 20 bp, Artificial Sequence
  Description of Artificial Sequence: Synthetic oligonucleotide
ctggtcttaaactcctgacc

SEQ ID NO: 7834 - DNA, 20 bp, Artificial Sequence
  Description of Artificial Sequence: Synthetic oligonucleotide
tggtcttaaactcctgacct

SEQ ID NO: 7835 - DNA, 20 bp, Artificial Sequence
  Description of Artificial Sequence: Synthetic oligonucleotide
ggtcttaaactcctgacctg

SEQ ID NO: 7836 - DNA, 20 bp, Artificial Sequence
  Description of Artificial Sequence: Synthetic oligonucleotide
gtcttaaactcctgacctga

SEQ ID NO: 7837 - DNA, 20 bp, Artificial Sequence
  Description of Artificial Sequence: Synthetic oligonucleotide
tcttaaactcctgacctgaa

SEQ ID NO: 7838 - DNA, 20 bp, Artificial Sequence
  Description of Artificial Sequence: Synthetic oligonucleotide
cttaaactcctgacctgaag

SEQ ID NO: 7839 - DNA, 20 bp, Artificial Sequence
  Description of Artificial Sequence: Synthetic oligonucleotide
ttaaactcctgacctgaagt

SEQ ID NO: 7840 - DNA, 20 bp, Artificial Sequence
  Description of Artificial Sequence: Synthetic oligonucleotide
taaactcctgacctgaagtg

SEQ ID NO: 7841 - DNA, 20 bp, Artificial Sequence
  Description of Artificial Sequence: Synthetic oligonucleotide
aaactcctgacctgaagtga

SEQ ID NO: 7842 - DNA, 20 bp, Artificial Sequence
  Description of Artificial Sequence: Synthetic oligonucleotide
aactcctgacctgaagtgat

SEQ ID NO: 7843 - DNA, 20 bp, Artificial Sequence
  Description of Artificial Sequence: Synthetic oligonucleotide
actcctgacctgaagtgatc

SEQ ID NO: 7844 - DNA, 20 bp, Artificial Sequence
  Description of Artificial Sequence: Synthetic oligonucleotide
ctcctgacctgaagtgatcc

SEQ ID NO: 7845 - DNA, 20 bp, Artificial Sequence
  Description of Artificial Sequence: Synthetic oligonucleotide
tcctgacctgaagtgatcca

SEQ ID NO: 7846 - DNA, 20 bp, Artificial Sequence
  Description of Artificial Sequence: Synthetic oligonucleotide
cctgacctgaagtgatccac

SEQ ID NO: 7847 - DNA, 20 bp, Artificial Sequence
  Description of Artificial Sequence: Synthetic oligonucleotide
ctgacctgaagtgatccacc

SEQ ID NO: 7848 - DNA, 20 bp, Artificial Sequence
  Description of Artificial Sequence: Synthetic oligonucleotide
tgacctgaagtgatccacct

SEQ ID NO: 7849 - DNA, 20 bp, Artificial Sequence
  Description of Artificial Sequence: Synthetic oligonucleotide
gacctgaagtgatccacctg

SEQ ID NO: 7850 - DNA, 20 bp, Artificial Sequence
  Description of Artificial Sequence: Synthetic oligonucleotide
acctgaagtgatccacctgc

SEQ ID NO: 7851 - DNA, 20 bp, Artificial Sequence
  Description of Artificial Sequence: Synthetic oligonucleotide
cctgaagtgatccacctgcc

SEQ ID NO: 7852 - DNA, 20 bp, Artificial Sequence
  Description of Artificial Sequence: Synthetic oligonucleotide
ctgaagtgatccacctgcct

SEQ ID NO: 7853 - DNA, 20 bp, Artificial Sequence
  Description of Artificial Sequence: Synthetic oligonucleotide
tgaagtgatccacctgcctc

SEQ ID NO: 7854 - DNA, 20 bp, Artificial Sequence
  Description of Artificial Sequence: Synthetic oligonucleotide
gaagtgatccacctgcctcg

SEQ ID NO: 7855 - DNA, 20 bp, Artificial Sequence
  Description of Artificial Sequence: Synthetic oligonucleotide
aagtgatccacctgcctcgg

SEQ ID NO: 7856 - DNA, 20 bp, Artificial Sequence
  Description of Artificial Sequence: Synthetic oligonucleotide
agtgatccacctgcctcggc

SEQ ID NO: 7857 - DNA, 20 bp, Artificial Sequence
  Description of Artificial Sequence: Synthetic oligonucleotide
gtgatccacctgcctcggcc

SEQ ID NO: 7858 - DNA, 20 bp, Artificial Sequence
  Description of Artificial Sequence: Synthetic oligonucleotide
tgatccacctgcctcggcct

SEQ ID NO: 7859 - DNA, 20 bp, Artificial Sequence
  Description of Artificial Sequence: Synthetic oligonucleotide
gatccacctgcctcggcctc

SEQ ID NO: 7860 - DNA, 20 bp, Artificial Sequence
  Description of Artificial Sequence: Synthetic oligonucleotide
atccacctgcctcggcctcc

SEQ ID NO: 7861 - DNA, 20 bp, Artificial Sequence
  Description of Artificial Sequence: Synthetic oligonucleotide
tccacctgcctcggcctccc

SEQ ID NO: 7862 - DNA, 20 bp, Artificial Sequence
  Description of Artificial Sequence: Synthetic oligonucleotide
ccacctgcctcggcctccca

SEQ ID NO: 7863 - DNA, 20 bp, Artificial Sequence
  Description of Artificial Sequence: Synthetic oligonucleotide
cacctgcctcggcctcccat

SEQ ID NO: 7864 - DNA, 20 bp, Artificial Sequence
  Description of Artificial Sequence: Synthetic oligonucleotide
acctgcctcggcctcccata

SEQ ID NO: 7865 - DNA, 20 bp, Artificial Sequence
  Description of Artificial Sequence: Synthetic oligonucleotide
cctgcctcggcctcccatag

SEQ ID NO: 7866 - DNA, 20 bp, Artificial Sequence
  Description of Artificial Sequence: Synthetic oligonucleotide
ctgcctcggcctcccatagt

SEQ ID NO: 7867 - DNA, 20 bp, Artificial Sequence
  Description of Artificial Sequence: Synthetic oligonucleotide
tgcctcggcctcccatagtg

SEQ ID NO: 7868 - DNA, 20 bp, Artificial Sequence
  Description of Artificial Sequence: Synthetic oligonucleotide
gcctcggcctcccatagtgc

SEQ ID NO: 7869 - DNA, 20 bp, Artificial Sequence
  Description of Artificial Sequence: Synthetic oligonucleotide
cctcggcctcccatagtgct

SEQ ID NO: 7870 - DNA, 20 bp, Artificial Sequence
  Description of Artificial Sequence: Synthetic oligonucleotide
ctcggcctcccatagtgctg

SEQ ID NO: 7871 - DNA, 20 bp, Artificial Sequence
  Description of Artificial Sequence: Synthetic oligonucleotide
tcggcctcccatagtgctgg

SEQ ID NO: 7872 - DNA, 20 bp, Artificial Sequence
  Description of Artificial Sequence: Synthetic oligonucleotide
cggcctcccatagtgctggg

SEQ ID NO: 7873 - DNA, 20 bp, Artificial Sequence
  Description of Artificial Sequence: Synthetic oligonucleotide
ggcctcccatagtgctggga

SEQ ID NO: 7874 - DNA, 20 bp, Artificial Sequence
  Description of Artificial Sequence: Synthetic oligonucleotide
gcctcccatagtgctgggat

SEQ ID NO: 7875 - DNA, 20 bp, Artificial Sequence
  Description of Artificial Sequence: Synthetic oligonucleotide
cctcccatagtgctgggatt

SEQ ID NO: 7876 - DNA, 20 bp, Artificial Sequence
  Description of Artificial Sequence: Synthetic oligonucleotide
ctcccatagtgctgggatta

SEQ ID NO: 7877 - DNA, 20 bp, Artificial Sequence
  Description of Artificial Sequence: Synthetic oligonucleotide
tcccatagtgctgggattac

SEQ ID NO: 7878 - DNA, 20 bp, Artificial Sequence
  Description of Artificial Sequence: Synthetic oligonucleotide
cccatagtgctgggattaca

SEQ ID NO: 7879 - DNA, 20 bp, Artificial Sequence
  Description of Artificial Sequence: Synthetic oligonucleotide
ccatagtgctgggattacag

SEQ ID NO: 7880 - DNA, 20 bp, Artificial Sequence
  Description of Artificial Sequence: Synthetic oligonucleotide
catagtgctgggattacagg

SEQ ID NO: 7881 - DNA, 20 bp, Artificial Sequence
  Description of Artificial Sequence: Synthetic oligonucleotide
atagtgctgggattacaggt

SEQ ID NO: 7882 - DNA, 20 bp, Artificial Sequence
  Description of Artificial Sequence: Synthetic oligonucleotide
tagtgctgggattacaggtg

SEQ ID NO: 7883 - DNA, 20 bp, Artificial Sequence
  Description of Artificial Sequence: Synthetic oligonucleotide
agtgctgggattacaggtgt

SEQ ID NO: 7884 - DNA, 20 bp, Artificial Sequence
  Description of Artificial Sequence: Synthetic oligonucleotide
gtgctgggattacaggtgtg

SEQ ID NO: 7885 - DNA, 20 bp, Artificial Sequence
  Description of Artificial Sequence: Synthetic oligonucleotide
tgctgggattacaggtgtga

SEQ ID NO: 7886 - DNA, 20 bp, Artificial Sequence
  Description of Artificial Sequence: Synthetic oligonucleotide
gctgggattacaggtgtgag

SEQ ID NO: 7887 - DNA, 20 bp, Artificial Sequence
  Description of Artificial Sequence: Synthetic oligonucleotide
ctgggattacaggtgtgagc

SEQ ID NO: 7888 - DNA, 20 bp, Artificial Sequence
  Description of Artificial Sequence: Synthetic oligonucleotide
tgggattacaggtgtgagcc

SEQ ID NO: 7889 - DNA, 20 bp, Artificial Sequence
  Description of Artificial Sequence: Synthetic oligonucleotide
gggattacaggtgtgagcca

SEQ ID NO: 7890 - DNA, 20 bp, Artificial Sequence
  Description of Artificial Sequence: Synthetic oligonucleotide
ggattacaggtgtgagccac

SEQ ID NO: 7891 - DNA, 20 bp, Artificial Sequence
  Description of Artificial Sequence: Synthetic oligonucleotide
gattacaggtgtgagccact

SEQ ID NO: 7892 - DNA, 20 bp, Artificial Sequence
  Description of Artificial Sequence: Synthetic oligonucleotide
attacaggtgtgagccactg

SEQ ID NO: 7893 - DNA, 20 bp, Artificial Sequence
  Description of Artificial Sequence: Synthetic oligonucleotide
ttacaggtgtgagccactgc

SEQ ID NO: 7894 - DNA, 20 bp, Artificial Sequence
  Description of Artificial Sequence: Synthetic oligonucleotide
tacaggtgtgagccactgcg

SEQ ID NO: 7895 - DNA, 20 bp, Artificial Sequence
  Description of Artificial Sequence: Synthetic oligonucleotide
acaggtgtgagccactgcgc

SEQ ID NO: 7896 - DNA, 20 bp, Artificial Sequence
  Description of Artificial Sequence: Synthetic oligonucleotide
caggtgtgagccactgcgcc

SEQ ID NO: 7897 - DNA, 20 bp, Artificial Sequence
  Description of Artificial Sequence: Synthetic oligonucleotide
aggtgtgagccactgcgccc

SEQ ID NO: 7898 - DNA, 20 bp, Artificial Sequence
  Description of Artificial Sequence: Synthetic oligonucleotide
ggtgtgagccactgcgccca

SEQ ID NO: 7899 - DNA, 20 bp, Artificial Sequence
  Description of Artificial Sequence: Synthetic oligonucleotide
gtgtgagccactgcgcccag

SEQ ID NO: 7900 - DNA, 20 bp, Artificial Sequence
  Description of Artificial Sequence: Synthetic oligonucleotide
tgtgagccactgcgcccagc

SEQ ID NO: 7901 - DNA, 20 bp, Artificial Sequence
  Description of Artificial Sequence: Synthetic oligonucleotide
gtgagccactgcgcccagcc

SEQ ID NO: 7902 - DNA, 20 bp, Artificial Sequence
  Description of Artificial Sequence: Synthetic oligonucleotide
tgagccactgcgcccagccg

SEQ ID NO: 7903 - DNA, 20 bp, Artificial Sequence
  Description of Artificial Sequence: Synthetic oligonucleotide
gagccactgcgcccagccga

SEQ ID NO: 7904 - DNA, 20 bp, Artificial Sequence
  Description of Artificial Sequence: Synthetic oligonucleotide
agccactgcgcccagccgaa

SEQ ID NO: 7905 - DNA, 20 bp, Artificial Sequence
  Description of Artificial Sequence: Synthetic oligonucleotide
gccactgcgcccagccgaat

SEQ ID NO: 7906 - DNA, 20 bp, Artificial Sequence
  Description of Artificial Sequence: Synthetic oligonucleotide
ccactgcgcccagccgaatt

SEQ ID NO: 7907 - DNA, 20 bp, Artificial Sequence
  Description of Artificial Sequence: Synthetic oligonucleotide
cactgcgcccagccgaattt

SEQ ID NO: 7908 - DNA, 20 bp, Artificial Sequence
  Description of Artificial Sequence: Synthetic oligonucleotide
actgcgcccagccgaatttt

SEQ ID NO: 7909 - DNA, 20 bp, Artificial Sequence
  Description of Artificial Sequence: Synthetic oligonucleotide
ctgcgcccagccgaattttc

SEQ ID NO: 7910 - DNA, 20 bp, Artificial Sequence
  Description of Artificial Sequence: Synthetic oligonucleotide
tgcgcccagccgaattttcc

SEQ ID NO: 7911 - DNA, 20 bp, Artificial Sequence
  Description of Artificial Sequence: Synthetic oligonucleotide
gcgcccagccgaattttcct

SEQ ID NO: 7912 - DNA, 20 bp, Artificial Sequence
  Description of Artificial Sequence: Synthetic oligonucleotide
cgcccagccgaattttcctt

SEQ ID NO: 7913 - DNA, 20 bp, Artificial Sequence
  Description of Artificial Sequence: Synthetic oligonucleotide
gcccagccgaattttccttt

SEQ ID NO: 7914 - DNA, 20 bp, Artificial Sequence
  Description of Artificial Sequence: Synthetic oligonucleotide
cccagccgaattttcctttc

SEQ ID NO: 7915 - DNA, 20 bp, Artificial Sequence
  Description of Artificial Sequence: Synthetic oligonucleotide
ccagccgaattttcctttct

SEQ ID NO: 7916 - DNA, 20 bp, Artificial Sequence
  Description of Artificial Sequence: Synthetic oligonucleotide
cagccgaattttcctttctt

SEQ ID NO: 7917 - DNA, 20 bp, Artificial Sequence
  Description of Artificial Sequence: Synthetic oligonucleotide
agccgaattttcctttcttt

SEQ ID NO: 7918 - DNA, 20 bp, Artificial Sequence
  Description of Artificial Sequence: Synthetic oligonucleotide
gccgaattttcctttcttta

SEQ ID NO: 7919 - DNA, 20 bp, Artificial Sequence
  Description of Artificial Sequence: Synthetic oligonucleotide
ccgaattttcctttctttaa

SEQ ID NO: 7920 - DNA, 20 bp, Artificial Sequence
  Description of Artificial Sequence: Synthetic oligonucleotide
cgaattttcctttctttaaa

SEQ ID NO: 7921 - DNA, 20 bp, Artificial Sequence
  Description of Artificial Sequence: Synthetic oligonucleotide
gaattttcctttctttaaac

SEQ ID NO: 7922 - DNA, 20 bp, Artificial Sequence
  Description of Artificial Sequence: Synthetic oligonucleotide
aattttcctttctttaaact

SEQ ID NO: 7923 - DNA, 20 bp, Artificial Sequence
  Description of Artificial Sequence: Synthetic oligonucleotide
attttcctttctttaaactg

SEQ ID NO: 7924 - DNA, 20 bp, Artificial Sequence
  Description of Artificial Sequence: Synthetic oligonucleotide
ttttcctttctttaaactgt

SEQ ID NO: 7925 - DNA, 20 bp, Artificial Sequence
  Description of Artificial Sequence: Synthetic oligonucleotide
tttcctttctttaaactgtg

SEQ ID NO: 7926 - DNA, 20 bp, Artificial Sequence
  Description of Artificial Sequence: Synthetic oligonucleotide
ttcctttctttaaactgtga

SEQ ID NO: 7927 - DNA, 20 bp, Artificial Sequence
  Description of Artificial Sequence: Synthetic oligonucleotide
tcctttctttaaactgtgaa

SEQ ID NO: 7928 - DNA, 20 bp, Artificial Sequence
  Description of Artificial Sequence: Synthetic oligonucleotide
cctttctttaaactgtgaat

SEQ ID NO: 7929 - DNA, 20 bp, Artificial Sequence
  Description of Artificial Sequence: Synthetic oligonucleotide
ctttctttaaactgtgaatg

SEQ ID NO: 7930 - DNA, 20 bp, Artificial Sequence
  Description of Artificial Sequence: Synthetic oligonucleotide
tttctttaaactgtgaatgg

SEQ ID NO: 7931 - DNA, 20 bp, Artificial Sequence
  Description of Artificial Sequence: Synthetic oligonucleotide
ttctttaaactgtgaatggc

SEQ ID NO: 7932 - DNA, 20 bp, Artificial Sequence
  Description of Artificial Sequence: Synthetic oligonucleotide
tctttaaactgtgaatggcc

SEQ ID NO: 7933 - DNA, 20 bp, Artificial Sequence
  Description of Artificial Sequence: Synthetic oligonucleotide
ctttaaactgtgaatggccc

SEQ ID NO: 7934 - DNA, 20 bp, Artificial Sequence
  Description of Artificial Sequence: Synthetic oligonucleotide
tttaaactgtgaatggccct

SEQ ID NO: 7935 - DNA, 20 bp, Artificial Sequence
  Description of Artificial Sequence: Synthetic oligonucleotide
ttaaactgtgaatggccctg

SEQ ID NO: 7936 - DNA, 20 bp, Artificial Sequence
  Description of Artificial Sequence: Synthetic oligonucleotide
taaactgtgaatggccctgt

SEQ ID NO: 7937 - DNA, 20 bp, Artificial Sequence
  Description of Artificial Sequence: Synthetic oligonucleotide
aaactgtgaatggccctgtt

SEQ ID NO: 7938 - DNA, 20 bp, Artificial Sequence
  Description of Artificial Sequence: Synthetic oligonucleotide
aactgtgaatggccctgttg

SEQ ID NO: 7939 - DNA, 20 bp, Artificial Sequence
  Description of Artificial Sequence: Synthetic oligonucleotide
actgtgaatggccctgttgt

SEQ ID NO: 7940 - DNA, 20 bp, Artificial Sequence
  Description of Artificial Sequence: Synthetic oligonucleotide
ctgtgaatggccctgttgtt

SEQ ID NO: 7941 - DNA, 20 bp, Artificial Sequence
  Description of Artificial Sequence: Synthetic oligonucleotide
tgtgaatggccctgttgttg

SEQ ID NO: 7942 - DNA, 20 bp, Artificial Sequence
  Description of Artificial Sequence: Synthetic oligonucleotide
gtgaatggccctgttgttgt

SEQ ID NO: 7943 - DNA, 20 bp, Artificial Sequence
  Description of Artificial Sequence: Synthetic oligonucleotide
tgaatggccctgttgttgta

SEQ ID NO: 7944 - DNA, 20 bp, Artificial Sequence
  Description of Artificial Sequence: Synthetic oligonucleotide
gaatggccctgttgttgtag

SEQ ID NO: 7945 - DNA, 20 bp, Artificial Sequence
  Description of Artificial Sequence: Synthetic oligonucleotide
aatggccctgttgttgtagt

SEQ ID NO: 7946 - DNA, 20 bp, Artificial Sequence
  Description of Artificial Sequence: Synthetic oligonucleotide
atggccctgttgttgtagtc

SEQ ID NO: 7947 - DNA, 20 bp, Artificial Sequence
  Description of Artificial Sequence: Synthetic oligonucleotide
tggccctgttgttgtagtcc

SEQ ID NO: 7948 - DNA, 20 bp, Artificial Sequence
  Description of Artificial Sequence: Synthetic oligonucleotide
ggccctgttgttgtagtccc

SEQ ID NO: 7949 - DNA, 20 bp, Artificial Sequence
  Description of Artificial Sequence: Synthetic oligonucleotide
gccctgttgttgtagtcccc

SEQ ID NO: 7950 - DNA, 20 bp, Artificial Sequence
  Description of Artificial Sequence: Synthetic oligonucleotide
ccctgttgttgtagtcccct

SEQ ID NO: 7951 - DNA, 20 bp, Artificial Sequence
  Description of Artificial Sequence: Synthetic oligonucleotide
cctgttgttgtagtcccctt

SEQ ID NO: 7952 - DNA, 20 bp, Artificial Sequence
  Description of Artificial Sequence: Synthetic oligonucleotide
ctgttgttgtagtccccttg

SEQ ID NO: 7953 - DNA, 20 bp, Artificial Sequence
  Description of Artificial Sequence: Synthetic oligonucleotide
tgttgttgtagtccccttga

SEQ ID NO: 7954 - DNA, 20 bp, Artificial Sequence
  Description of Artificial Sequence: Synthetic oligonucleotide
gttgttgtagtccccttgag

SEQ ID NO: 7955 - DNA, 20 bp, Artificial Sequence
  Description of Artificial Sequence: Synthetic oligonucleotide
ttgttgtagtccccttgagg

SEQ ID NO: 7956 - DNA, 20 bp, Artificial Sequence
  Description of Artificial Sequence: Synthetic oligonucleotide
tgttgtagtccccttgaggg

SEQ ID NO: 7957 - DNA, 20 bp, Artificial Sequence
  Description of Artificial Sequence: Synthetic oligonucleotide
gttgtagtccccttgagggg

SEQ ID NO: 7958 - DNA, 20 bp, Artificial Sequence
  Description of Artificial Sequence: Synthetic oligonucleotide
ttgtagtccccttgaggggg

SEQ ID NO: 7959 - DNA, 20 bp, Artificial Sequence
  Description of Artificial Sequence: Synthetic oligonucleotide
tgtagtccccttgagggggt

SEQ ID NO: 7960 - DNA, 20 bp, Artificial Sequence
  Description of Artificial Sequence: Synthetic oligonucleotide
gtagtccccttgagggggtg

SEQ ID NO: 7961 - DNA, 20 bp, Artificial Sequence
  Description of Artificial Sequence: Synthetic oligonucleotide
tagtccccttgagggggtga

SEQ ID NO: 7962 - DNA, 20 bp, Artificial Sequence
  Description of Artificial Sequence: Synthetic oligonucleotide
agtccccttgagggggtgaa

SEQ ID NO: 7963 - DNA, 20 bp, Artificial Sequence
  Description of Artificial Sequence: Synthetic oligonucleotide
gtccccttgagggggtgaag

SEQ ID NO: 7964 - DNA, 20 bp, Artificial Sequence
  Description of Artificial Sequence: Synthetic oligonucleotide
tccccttgagggggtgaagg

SEQ ID NO: 7965 - DNA, 20 bp, Artificial Sequence
  Description of Artificial Sequence: Synthetic oligonucleotide
ccccttgagggggtgaagga

SEQ ID NO: 7966 - DNA, 20 bp, Artificial Sequence
  Description of Artificial Sequence: Synthetic oligonucleotide
cccttgagggggtgaaggac

SEQ ID NO: 7967 - DNA, 20 bp, Artificial Sequence
  Description of Artificial Sequence: Synthetic oligonucleotide
ccttgagggggtgaaggaca

SEQ ID NO: 7968 - DNA, 20 bp, Artificial Sequence
  Description of Artificial Sequence: Synthetic oligonucleotide
cttgagggggtgaaggacag

SEQ ID NO: 7969 - DNA, 20 bp, Artificial Sequence
  Description of Artificial Sequence: Synthetic oligonucleotide
ttgagggggtgaaggacagg

SEQ ID NO: 7970 - DNA, 20 bp, Artificial Sequence
  Description of Artificial Sequence: Synthetic oligonucleotide
tgagggggtgaaggacaggt

SEQ ID NO: 7971 - DNA, 20 bp, Artificial Sequence
  Description of Artificial Sequence: Synthetic oligonucleotide
gagggggtgaaggacaggta

SEQ ID NO: 7972 - DNA, 20 bp, Artificial Sequence
  Description of Artificial Sequence: Synthetic oligonucleotide
agggggtgaaggacaggtat

SEQ ID NO: 7973 - DNA, 20 bp, Artificial Sequence
  Description of Artificial Sequence: Synthetic oligonucleotide
gggggtgaaggacaggtatt

SEQ ID NO: 7974 - DNA, 20 bp, Artificial Sequence
  Description of Artificial Sequence: Synthetic oligonucleotide
ggggtgaaggacaggtatta

SEQ ID NO: 7975 - DNA, 20 bp, Artificial Sequence
  Description of Artificial Sequence: Synthetic oligonucleotide
gggtgaaggacaggtattag

SEQ ID NO: 7976 - DNA, 20 bp, Artificial Sequence
  Description of Artificial Sequence: Synthetic oligonucleotide
ggtgaaggacaggtattagg

SEQ ID NO: 7977 - DNA, 20 bp, Artificial Sequence
  Description of Artificial Sequence: Synthetic oligonucleotide
gtgaaggacaggtattaggg

SEQ ID NO: 7978 - DNA, 20 bp, Artificial Sequence
  Description of Artificial Sequence: Synthetic oligonucleotide
tgaaggacaggtattagggc

SEQ ID NO: 7979 - DNA, 20 bp, Artificial Sequence
  Description of Artificial Sequence: Synthetic oligonucleotide
gaaggacaggtattagggca

SEQ ID NO: 7980 - DNA, 20 bp, Artificial Sequence
  Description of Artificial Sequence: Synthetic oligonucleotide
aaggacaggtattagggcat

SEQ ID NO: 7981 - DNA, 20 bp, Artificial Sequence
  Description of Artificial Sequence: Synthetic oligonucleotide
aggacaggtattagggcatg

SEQ ID NO: 7982 - DNA, 20 bp, Artificial Sequence
  Description of Artificial Sequence: Synthetic oligonucleotide
ggacaggtattagggcatgg

SEQ ID NO: 7983 - DNA, 20 bp, Artificial Sequence
  Description of Artificial Sequence: Synthetic oligonucleotide
gacaggtattagggcatggc

SEQ ID NO: 7984 - DNA, 20 bp, Artificial Sequence
  Description of Artificial Sequence: Synthetic oligonucleotide
acaggtattagggcatggcc

SEQ ID NO: 7985 - DNA, 20 bp, Artificial Sequence
  Description of Artificial Sequence: Synthetic oligonucleotide
caggtattagggcatggcca

SEQ ID NO: 7986 - DNA, 20 bp, Artificial Sequence
  Description of Artificial Sequence: Synthetic oligonucleotide
aggtattagggcatggccag

SEQ ID NO: 7987 - DNA, 20 bp, Artificial Sequence
  Description of Artificial Sequence: Synthetic oligonucleotide
ggtattagggcatggccagt

SEQ ID NO: 7988 - DNA, 20 bp, Artificial Sequence
  Description of Artificial Sequence: Synthetic oligonucleotide
gtattagggcatggccagtg

SEQ ID NO: 7989 - DNA, 20 bp, Artificial Sequence
  Description of Artificial Sequence: Synthetic oligonucleotide
tattagggcatggccagtga

SEQ ID NO: 7990 - DNA, 20 bp, Artificial Sequence
  Description of Artificial Sequence: Synthetic oligonucleotide
attagggcatggccagtgac

SEQ ID NO: 7991 - DNA, 20 bp, Artificial Sequence
  Description of Artificial Sequence: Synthetic oligonucleotide
ttagggcatggccagtgact

SEQ ID NO: 7992 - DNA, 20 bp, Artificial Sequence
  Description of Artificial Sequence: Synthetic oligonucleotide
tagggcatggccagtgactg

SEQ ID NO: 7993 - DNA, 20 bp, Artificial Sequence
  Description of Artificial Sequence: Synthetic oligonucleotide
agggcatggccagtgactgt

SEQ ID NO: 7994 - DNA, 20 bp, Artificial Sequence
  Description of Artificial Sequence: Synthetic oligonucleotide
gggcatggccagtgactgta

SEQ ID NO: 7995 - DNA, 20 bp, Artificial Sequence
  Description of Artificial Sequence: Synthetic oligonucleotide
ggcatggccagtgactgtaa

SEQ ID NO: 7996 - DNA, 20 bp, Artificial Sequence
  Description of Artificial Sequence: Synthetic oligonucleotide
gcatggccagtgactgtaat

SEQ ID NO: 7997 - DNA, 20 bp, Artificial Sequence
  Description of Artificial Sequence: Synthetic oligonucleotide
catggccagtgactgtaatg

SEQ ID NO: 7998 - DNA, 20 bp, Artificial Sequence
  Description of Artificial Sequence: Synthetic oligonucleotide
atggccagtgactgtaatga

SEQ ID NO: 7999 - DNA, 20 bp, Artificial Sequence
  Description of Artificial Sequence: Synthetic oligonucleotide
tggccagtgactgtaatgac

SEQ ID NO: 8000 - DNA, 20 bp, Artificial Sequence
  Description of Artificial Sequence: Synthetic oligonucleotide
ggccagtgactgtaatgacc

SEQ ID NO: 8001 - DNA, 20 bp, Artificial Sequence
  Description of Artificial Sequence: Synthetic oligonucleotide
gccagtgactgtaatgacct

SEQ ID NO: 8002 - DNA, 20 bp, Artificial Sequence
  Description of Artificial Sequence: Synthetic oligonucleotide
ccagtgactgtaatgacctc

SEQ ID NO: 8003 - DNA, 20 bp, Artificial Sequence
  Description of Artificial Sequence: Synthetic oligonucleotide
cagtgactgtaatgacctca

SEQ ID NO: 8004 - DNA, 20 bp, Artificial Sequence
  Description of Artificial Sequence: Synthetic oligonucleotide
agtgactgtaatgacctcac

SEQ ID NO: 8005 - DNA, 20 bp, Artificial Sequence
  Description of Artificial Sequence: Synthetic oligonucleotide
gtgactgtaatgacctcacc

SEQ ID NO: 8006 - DNA, 20 bp, Artificial Sequence
  Description of Artificial Sequence: Synthetic oligonucleotide
tgactgtaatgacctcacct

SEQ ID NO: 8007 - DNA, 20 bp, Artificial Sequence
  Description of Artificial Sequence: Synthetic oligonucleotide
gactgtaatgacctcacctc

SEQ ID NO: 8008 - DNA, 20 bp, Artificial Sequence
  Description of Artificial Sequence: Synthetic oligonucleotide
actgtaatgacctcacctcc

SEQ ID NO: 8009 - DNA, 20 bp, Artificial Sequence
  Description of Artificial Sequence: Synthetic oligonucleotide
ctgtaatgacctcacctcca

SEQ ID NO: 8010 - DNA, 20 bp, Artificial Sequence
  Description of Artificial Sequence: Synthetic oligonucleotide
tgtaatgacctcacctccag

SEQ ID NO: 8011 - DNA, 20 bp, Artificial Sequence
  Description of Artificial Sequence: Synthetic oligonucleotide
gtaatgacctcacctccagt

SEQ ID NO: 8012 - DNA, 20 bp, Artificial Sequence
  Description of Artificial Sequence: Synthetic oligonucleotide
taatgacctcacctccagtt

SEQ ID NO: 8013 - DNA, 20 bp, Artificial Sequence
  Description of Artificial Sequence: Synthetic oligonucleotide
aatgacctcacctccagttc

SEQ ID NO: 8014 - DNA, 20 bp, Artificial Sequence
  Description of Artificial Sequence: Synthetic oligonucleotide
atgacctcacctccagttca

SEQ ID NO: 8015 - DNA, 20 bp, Artificial Sequence
  Description of Artificial Sequence: Synthetic oligonucleotide
tgacctcacctccagttcag

SEQ ID NO: 8016 - DNA, 20 bp, Artificial Sequence
  Description of Artificial Sequence: Synthetic oligonucleotide
gacctcacctccagttcagg

SEQ ID NO: 8017 - DNA, 20 bp, Artificial Sequence
  Description of Artificial Sequence: Synthetic oligonucleotide
acctcacctccagttcaggg

SEQ ID NO: 8018 - DNA, 20 bp, Artificial Sequence
  Description of Artificial Sequence: Synthetic oligonucleotide
cctcacctccagttcagggc

SEQ ID NO: 8019 - DNA, 20 bp, Artificial Sequence
  Description of Artificial Sequence: Synthetic oligonucleotide
ctcacctccagttcagggct

SEQ ID NO: 8020 - DNA, 20 bp, Artificial Sequence
  Description of Artificial Sequence: Synthetic oligonucleotide
tcacctccagttcagggctg

SEQ ID NO: 8021 - DNA, 20 bp, Artificial Sequence
  Description of Artificial Sequence: Synthetic oligonucleotide
cacctccagttcagggctgc

SEQ ID NO: 8022 - DNA, 20 bp, Artificial Sequence
  Description of Artificial Sequence: Synthetic oligonucleotide
acctccagttcagggctgcc

SEQ ID NO: 8023 - DNA, 20 bp, Artificial Sequence
  Description of Artificial Sequence: Synthetic oligonucleotide
cctccagttcagggctgccc

SEQ ID NO: 8024 - DNA, 20 bp, Artificial Sequence
  Description of Artificial Sequence: Synthetic oligonucleotide
ctccagttcagggctgccca

SEQ ID NO: 8025 - DNA, 20 bp, Artificial Sequence
  Description of Artificial Sequence: Synthetic oligonucleotide
tccagttcagggctgcccag

SEQ ID NO: 8026 - DNA, 20 bp, Artificial Sequence
  Description of Artificial Sequence: Synthetic oligonucleotide
ccagttcagggctgcccagg

SEQ ID NO: 8027 - DNA, 20 bp, Artificial Sequence
  Description of Artificial Sequence: Synthetic oligonucleotide
cagttcagggctgcccagga

SEQ ID NO: 8028 - DNA, 20 bp, Artificial Sequence
  Description of Artificial Sequence: Synthetic oligonucleotide
agttcagggctgcccaggaa

SEQ ID NO: 8029 - DNA, 20 bp, Artificial Sequence
  Description of Artificial Sequence: Synthetic oligonucleotide
gttcagggctgcccaggaag

SEQ ID NO: 8030 - DNA, 20 bp, Artificial Sequence
  Description of Artificial Sequence: Synthetic oligonucleotide
ttcagggctgcccaggaagt

SEQ ID NO: 8031 - DNA, 20 bp, Artificial Sequence
  Description of Artificial Sequence: Synthetic oligonucleotide
tcagggctgcccaggaagtc

SEQ ID NO: 8032 - DNA, 20 bp, Artificial Sequence
  Description of Artificial Sequence: Synthetic oligonucleotide
cagggctgcccaggaagtca

SEQ ID NO: 8033 - DNA, 20 bp, Artificial Sequence
  Description of Artificial Sequence: Synthetic oligonucleotide
agggctgcccaggaagtcat

SEQ ID NO: 8034 - DNA, 20 bp, Artificial Sequence
  Description of Artificial Sequence: Synthetic oligonucleotide
gggctgcccaggaagtcatc

SEQ ID NO: 8035 - DNA, 20 bp, Artificial Sequence
  Description of Artificial Sequence: Synthetic oligonucleotide
ggctgcccaggaagtcatca

SEQ ID NO: 8036 - DNA, 20 bp, Artificial Sequence
  Description of Artificial Sequence: Synthetic oligonucleotide
gctgcccaggaagtcatcag

SEQ ID NO: 8037 - DNA, 20 bp, Artificial Sequence
  Description of Artificial Sequence: Synthetic oligonucleotide
ctgcccaggaagtcatcagg

SEQ ID NO: 8038 - DNA, 20 bp, Artificial Sequence
  Description of Artificial Sequence: Synthetic oligonucleotide
tgcccaggaagtcatcagga

SEQ ID NO: 8039 - DNA, 20 bp, Artificial Sequence
  Description of Artificial Sequence: Synthetic oligonucleotide
gcccaggaagtcatcaggag

SEQ ID NO: 8040 - DNA, 20 bp, Artificial Sequence
  Description of Artificial Sequence: Synthetic oligonucleotide
cccaggaagtcatcaggagg

SEQ ID NO: 8041 - DNA, 20 bp, Artificial Sequence
  Description of Artificial Sequence: Synthetic oligonucleotide
ccaggaagtcatcaggagga

SEQ ID NO: 8042 - DNA, 20 bp, Artificial Sequence
  Description of Artificial Sequence: Synthetic oligonucleotide
caggaagtcatcaggaggaa

SEQ ID NO: 8043 - DNA, 20 bp, Artificial Sequence
  Description of Artificial Sequence: Synthetic oligonucleotide
aggaagtcatcaggaggaag

SEQ ID NO: 8044 - DNA, 20 bp, Artificial Sequence
  Description of Artificial Sequence: Synthetic oligonucleotide
ggaagtcatcaggaggaagc

SEQ ID NO: 8045 - DNA, 20 bp, Artificial Sequence
  Description of Artificial Sequence: Synthetic oligonucleotide
gaagtcatcaggaggaagct

SEQ ID NO: 8046 - DNA, 20 bp, Artificial Sequence
  Description of Artificial Sequence: Synthetic oligonucleotide
aagtcatcaggaggaagctt

SEQ ID NO: 8047 - DNA, 20 bp, Artificial Sequence
  Description of Artificial Sequence: Synthetic oligonucleotide
agtcatcaggaggaagctta

SEQ ID NO: 8048 - DNA, 20 bp, Artificial Sequence
  Description of Artificial Sequence: Synthetic oligonucleotide
gtcatcaggaggaagcttat

SEQ ID NO: 8049 - DNA, 20 bp, Artificial Sequence
  Description of Artificial Sequence: Synthetic oligonucleotide
tcatcaggaggaagcttata

SEQ ID NO: 8050 - DNA, 20 bp, Artificial Sequence
  Description of Artificial Sequence: Synthetic oligonucleotide
catcaggaggaagcttatac

SEQ ID NO: 8051 - DNA, 20 bp, Artificial Sequence
  Description of Artificial Sequence: Synthetic oligonucleotide
atcaggaggaagcttataca

SEQ ID NO: 8052 - DNA, 20 bp, Artificial Sequence
  Description of Artificial Sequence: Synthetic oligonucleotide
tcaggaggaagcttatacac

SEQ ID NO: 8053 - DNA, 20 bp, Artificial Sequence
  Description of Artificial Sequence: Synthetic oligonucleotide
caggaggaagcttatacact

SEQ ID NO: 8054 - DNA, 20 bp, Artificial Sequence
  Description of Artificial Sequence: Synthetic oligonucleotide
aggaggaagcttatacactc

SEQ ID NO: 8055 - DNA, 20 bp, Artificial Sequence
  Description of Artificial Sequence: Synthetic oligonucleotide
ggaggaagcttatacactcc

SEQ ID NO: 8056 - DNA, 20 bp, Artificial Sequence
  Description of Artificial Sequence: Synthetic oligonucleotide
gaggaagcttatacactcca

SEQ ID NO: 8057 - DNA, 20 bp, Artificial Sequence
  Description of Artificial Sequence: Synthetic oligonucleotide
aggaagcttatacactccag

SEQ ID NO: 8058 - DNA, 20 bp, Artificial Sequence
  Description of Artificial Sequence: Synthetic oligonucleotide
ggaagcttatacactccaga

SEQ ID NO: 8059 - DNA, 20 bp, Artificial Sequence
  Description of Artificial Sequence: Synthetic oligonucleotide
gaagcttatacactccagag

SEQ ID NO: 8060 - DNA, 20 bp, Artificial Sequence
  Description of Artificial Sequence: Synthetic oligonucleotide
aagcttatacactccagaga

SEQ ID NO: 8061 - DNA, 20 bp, Artificial Sequence
  Description of Artificial Sequence: Synthetic oligonucleotide
agcttatacactccagagat

SEQ ID NO: 8062 - DNA, 20 bp, Artificial Sequence
  Description of Artificial Sequence: Synthetic oligonucleotide
gcttatacactccagagatg

SEQ ID NO: 8063 - DNA, 20 bp, Artificial Sequence
  Description of Artificial Sequence: Synthetic oligonucleotide
cttatacactccagagatgc

SEQ ID NO: 8064 - DNA, 20 bp, Artificial Sequence
  Description of Artificial Sequence: Synthetic oligonucleotide
ttatacactccagagatgcg

SEQ ID NO: 8065 - DNA, 20 bp, Artificial Sequence
  Description of Artificial Sequence: Synthetic oligonucleotide
tatacactccagagatgcgg

SEQ ID NO: 8066 - DNA, 20 bp, Artificial Sequence
  Description of Artificial Sequence: Synthetic oligonucleotide
atacactccagagatgcggt

SEQ ID NO: 8067 - DNA, 20 bp, Artificial Sequence
  Description of Artificial Sequence: Synthetic oligonucleotide
tacactccagagatgcggta

SEQ ID NO: 8068 - DNA, 20 bp, Artificial Sequence
  Description of Artificial Sequence: Synthetic oligonucleotide
acactccagagatgcggtag

SEQ ID NO: 8069 - DNA, 20 bp, Artificial Sequence
  Description of Artificial Sequence: Synthetic oligonucleotide
cactccagagatgcggtagt

SEQ ID NO: 8070 - DNA, 20 bp, Artificial Sequence
  Description of Artificial Sequence: Synthetic oligonucleotide
actccagagatgcggtagtt

SEQ ID NO: 8071 - DNA, 20 bp, Artificial Sequence
  Description of Artificial Sequence: Synthetic oligonucleotide
ctccagagatgcggtagttc

SEQ ID NO: 8072 - DNA, 20 bp, Artificial Sequence
  Description of Artificial Sequence: Synthetic oligonucleotide
tccagagatgcggtagttct

SEQ ID NO: 8073 - DNA, 20 bp, Artificial Sequence
  Description of Artificial Sequence: Synthetic oligonucleotide
ccagagatgcggtagttctt

SEQ ID NO: 8074 - DNA, 20 bp, Artificial Sequence
  Description of Artificial Sequence: Synthetic oligonucleotide
cagagatgcggtagttcttc

SEQ ID NO: 8075 - DNA, 20 bp, Artificial Sequence
  Description of Artificial Sequence: Synthetic oligonucleotide
agagatgcggtagttcttct

SEQ ID NO: 8076 - DNA, 20 bp, Artificial Sequence
  Description of Artificial Sequence: Synthetic oligonucleotide
gagatgcggtagttcttctg

SEQ ID NO: 8077 - DNA, 20 bp, Artificial Sequence
  Description of Artificial Sequence: Synthetic oligonucleotide
agatgcggtagttcttctgg

SEQ ID NO: 8078 - DNA, 20 bp, Artificial Sequence
  Description of Artificial Sequence: Synthetic oligonucleotide
gatgcggtagttcttctggt

SEQ ID NO: 8079 - DNA, 20 bp, Artificial Sequence
  Description of Artificial Sequence: Synthetic oligonucleotide
atgcggtagttcttctggta

SEQ ID NO: 8080 - DNA, 20 bp, Artificial Sequence
  Description of Artificial Sequence: Synthetic oligonucleotide
tgcggtagttcttctggtag

SEQ ID NO: 8081 - DNA, 20 bp, Artificial Sequence
  Description of Artificial Sequence: Synthetic oligonucleotide
gcggtagttcttctggtaga

SEQ ID NO: 8082 - DNA, 20 bp, Artificial Sequence
  Description of Artificial Sequence: Synthetic oligonucleotide
cggtagttcttctggtagag

SEQ ID NO: 8083 - DNA, 20 bp, Artificial Sequence
  Description of Artificial Sequence: Synthetic oligonucleotide
ggtagttcttctggtagagg

SEQ ID NO: 8084 - DNA, 20 bp, Artificial Sequence
  Description of Artificial Sequence: Synthetic oligonucleotide
gtagttcttctggtagaggg

SEQ ID NO: 8085 - DNA, 20 bp, Artificial Sequence
  Description of Artificial Sequence: Synthetic oligonucleotide
tagttcttctggtagaggga

SEQ ID NO: 8086 - DNA, 20 bp, Artificial Sequence
  Description of Artificial Sequence: Synthetic oligonucleotide
agttcttctggtagagggaa

SEQ ID NO: 8087 - DNA, 20 bp, Artificial Sequence
  Description of Artificial Sequence: Synthetic oligonucleotide
gttcttctggtagagggaag

SEQ ID NO: 8088 - DNA, 20 bp, Artificial Sequence
  Description of Artificial Sequence: Synthetic oligonucleotide
ttcttctggtagagggaaga

SEQ ID NO: 8089 - DNA, 20 bp, Artificial Sequence
  Description of Artificial Sequence: Synthetic oligonucleotide
tcttctggtagagggaagag

SEQ ID NO: 8090 - DNA, 20 bp, Artificial Sequence
  Description of Artificial Sequence: Synthetic oligonucleotide
cttctggtagagggaagagc

SEQ ID NO: 8091 - DNA, 20 bp, Artificial Sequence
  Description of Artificial Sequence: Synthetic oligonucleotide
ttctggtagagggaagagca

SEQ ID NO: 8092 - DNA, 20 bp, Artificial Sequence
  Description of Artificial Sequence: Synthetic oligonucleotide
tctggtagagggaagagcag

SEQ ID NO: 8093 - DNA, 20 bp, Artificial Sequence
  Description of Artificial Sequence: Synthetic oligonucleotide
ctggtagagggaagagcagt

SEQ ID NO: 8094 - DNA, 20 bp, Artificial Sequence
  Description of Artificial Sequence: Synthetic oligonucleotide
tggtagagggaagagcagtc

SEQ ID NO: 8095 - DNA, 20 bp, Artificial Sequence
  Description of Artificial Sequence: Synthetic oligonucleotide
ggtagagggaagagcagtcg

SEQ ID NO: 8096 - DNA, 20 bp, Artificial Sequence
  Description of Artificial Sequence: Synthetic oligonucleotide
gtagagggaagagcagtcgt

SEQ ID NO: 8097 - DNA, 20 bp, Artificial Sequence
  Description of Artificial Sequence: Synthetic oligonucleotide
tagagggaagagcagtcgta

SEQ ID NO: 8098 - DNA, 20 bp, Artificial Sequence
  Description of Artificial Sequence: Synthetic oligonucleotide
agagggaagagcagtcgtag

SEQ ID NO: 8099 - DNA, 20 bp, Artificial Sequence
  Description of Artificial Sequence: Synthetic oligonucleotide
gagggaagagcagtcgtaga

SEQ ID NO: 8100 - DNA, 20 bp, Artificial Sequence
  Description of Artificial Sequence: Synthetic oligonucleotide
agggaagagcagtcgtagat

SEQ ID NO: 8101 - DNA, 20 bp, Artificial Sequence
  Description of Artificial Sequence: Synthetic oligonucleotide
gggaagagcagtcgtagatg

SEQ ID NO: 8102 - DNA, 20 bp, Artificial Sequence
  Description of Artificial Sequence: Synthetic oligonucleotide
ggaagagcagtcgtagatgg

SEQ ID NO: 8103 - DNA, 20 bp, Artificial Sequence
  Description of Artificial Sequence: Synthetic oligonucleotide
gaagagcagtcgtagatggc

SEQ ID NO: 8104 - DNA, 20 bp, Artificial Sequence
  Description of Artificial Sequence: Synthetic oligonucleotide
aagagcagtcgtagatggca

SEQ ID NO: 8105 - DNA, 20 bp, Artificial Sequence
  Description of Artificial Sequence: Synthetic oligonucleotide
agagcagtcgtagatggcat

SEQ ID NO: 8106 - DNA, 20 bp, Artificial Sequence
  Description of Artificial Sequence: Synthetic oligonucleotide
gagcagtcgtagatggcatc

SEQ ID NO: 8107 - DNA, 20 bp, Artificial Sequence
  Description of Artificial Sequence: Synthetic oligonucleotide
agcagtcgtagatggcatct

SEQ ID NO: 8108 - DNA, 20 bp, Artificial Sequence
  Description of Artificial Sequence: Synthetic oligonucleotide
gcagtcgtagatggcatcta

SEQ ID NO: 8109 - DNA, 20 bp, Artificial Sequence
  Description of Artificial Sequence: Synthetic oligonucleotide
cagtcgtagatggcatctac

SEQ ID NO: 8110 - DNA, 20 bp, Artificial Sequence
  Description of Artificial Sequence: Synthetic oligonucleotide
agtcgtagatggcatctaca

SEQ ID NO: 8111 - DNA, 20 bp, Artificial Sequence
  Description of Artificial Sequence: Synthetic oligonucleotide
gtcgtagatggcatctacaa

SEQ ID NO: 8112 - DNA, 20 bp, Artificial Sequence
  Description of Artificial Sequence: Synthetic oligonucleotide
tcgtagatggcatctacaag

SEQ ID NO: 8113 - DNA, 20 bp, Artificial Sequence
  Description of Artificial Sequence: Synthetic oligonucleotide
cgtagatggcatctacaaga

SEQ ID NO: 8114 - DNA, 20 bp, Artificial Sequence
  Description of Artificial Sequence: Synthetic oligonucleotide
gtagatggcatctacaagag

SEQ ID NO: 8115 - DNA, 20 bp, Artificial Sequence
  Description of Artificial Sequence: Synthetic oligonucleotide
tagatggcatctacaagaga

SEQ ID NO: 8116 - DNA, 20 bp, Artificial Sequence
  Description of Artificial Sequence: Synthetic oligonucleotide
agatggcatctacaagagaa

SEQ ID NO: 8117 - DNA, 20 bp, Artificial Sequence
  Description of Artificial Sequence: Synthetic oligonucleotide
gatggcatctacaagagaac

SEQ ID NO: 8118 - DNA, 20 bp, Artificial Sequence
  Description of Artificial Sequence: Synthetic oligonucleotide
atggcatctacaagagaaca

SEQ ID NO: 8119 - DNA, 20 bp, Artificial Sequence
  Description of Artificial Sequence: Synthetic oligonucleotide
tggcatctacaagagaacaa

SEQ ID NO: 8120 - DNA, 20 bp, Artificial Sequence
  Description of Artificial Sequence: Synthetic oligonucleotide
ggcatctacaagagaacaaa

SEQ ID NO: 8121 - DNA, 20 bp, Artificial Sequence
  Description of Artificial Sequence: Synthetic oligonucleotide
gcatctacaagagaacaaac

SEQ ID NO: 8122 - DNA, 20 bp, Artificial Sequence
  Description of Artificial Sequence: Synthetic oligonucleotide
catctacaagagaacaaacc

SEQ ID NO: 8123 - DNA, 20 bp, Artificial Sequence
  Description of Artificial Sequence: Synthetic oligonucleotide
atctacaagagaacaaacca

SEQ ID NO: 8124 - DNA, 20 bp, Artificial Sequence
  Description of Artificial Sequence: Synthetic oligonucleotide
tctacaagagaacaaaccac

SEQ ID NO: 8125 - DNA, 20 bp, Artificial Sequence
  Description of Artificial Sequence: Synthetic oligonucleotide
ctacaagagaacaaaccaca

SEQ ID NO: 8126 - DNA, 20 bp, Artificial Sequence
  Description of Artificial Sequence: Synthetic oligonucleotide
tacaagagaacaaaccacag

SEQ ID NO: 8127 - DNA, 20 bp, Artificial Sequence
  Description of Artificial Sequence: Synthetic oligonucleotide
acaagagaacaaaccacagg

SEQ ID NO: 8128 - DNA, 20 bp, Artificial Sequence
  Description of Artificial Sequence: Synthetic oligonucleotide
caagagaacaaaccacaggg

SEQ ID NO: 8129 - DNA, 20 bp, Artificial Sequence
  Description of Artificial Sequence: Synthetic oligonucleotide
aagagaacaaaccacagggt

SEQ ID NO: 8130 - DNA, 20 bp, Artificial Sequence
  Description of Artificial Sequence: Synthetic oligonucleotide
agagaacaaaccacagggtg

SEQ ID NO: 8131 - DNA, 20 bp, Artificial Sequence
  Description of Artificial Sequence: Synthetic oligonucleotide
gagaacaaaccacagggtga

SEQ ID NO: 8132 - DNA, 20 bp, Artificial Sequence
  Description of Artificial Sequence: Synthetic oligonucleotide
agaacaaaccacagggtgag

SEQ ID NO: 8133 - DNA, 20 bp, Artificial Sequence
  Description of Artificial Sequence: Synthetic oligonucleotide
gaacaaaccacagggtgagc

SEQ ID NO: 8134 - DNA, 20 bp, Artificial Sequence
  Description of Artificial Sequence: Synthetic oligonucleotide
aacaaaccacagggtgagca

SEQ ID NO: 8135 - DNA, 20 bp, Artificial Sequence
  Description of Artificial Sequence: Synthetic oligonucleotide
acaaaccacagggtgagcat

SEQ ID NO: 8136 - DNA, 20 bp, Artificial Sequence
  Description of Artificial Sequence: Synthetic oligonucleotide
caaaccacagggtgagcatt

SEQ ID NO: 8137 - DNA, 20 bp, Artificial Sequence
  Description of Artificial Sequence: Synthetic oligonucleotide
aaaccacagggtgagcattt

SEQ ID NO: 8138 - DNA, 20 bp, Artificial Sequence
  Description of Artificial Sequence: Synthetic oligonucleotide
aaccacagggtgagcattta

SEQ ID NO: 8139 - DNA, 20 bp, Artificial Sequence
  Description of Artificial Sequence: Synthetic oligonucleotide
accacagggtgagcatttag

SEQ ID NO: 8140 - DNA, 20 bp, Artificial Sequence
  Description of Artificial Sequence: Synthetic oligonucleotide
ccacagggtgagcatttaga

SEQ ID NO: 8141 - DNA, 20 bp, Artificial Sequence
  Description of Artificial Sequence: Synthetic oligonucleotide
cacagggtgagcatttagac

SEQ ID NO: 8142 - DNA, 20 bp, Artificial Sequence
  Description of Artificial Sequence: Synthetic oligonucleotide
acagggtgagcatttagacc

SEQ ID NO: 8143 - DNA, 20 bp, Artificial Sequence
  Description of Artificial Sequence: Synthetic oligonucleotide
cagggtgagcatttagaccc

SEQ ID NO: 8144 - DNA, 20 bp, Artificial Sequence
  Description of Artificial Sequence: Synthetic oligonucleotide
agggtgagcatttagaccca

SEQ ID NO: 8145 - DNA, 20 bp, Artificial Sequence
  Description of Artificial Sequence: Synthetic oligonucleotide
gggtgagcatttagacccag

SEQ ID NO: 8146 - DNA, 20 bp, Artificial Sequence
  Description of Artificial Sequence: Synthetic oligonucleotide
ggtgagcatttagacccagt

SEQ ID NO: 8147 - DNA, 20 bp, Artificial Sequence
  Description of Artificial Sequence: Synthetic oligonucleotide
gtgagcatttagacccagtg

SEQ ID NO: 8148 - DNA, 20 bp, Artificial Sequence
  Description of Artificial Sequence: Synthetic oligonucleotide
tgagcatttagacccagtgg

SEQ ID NO: 8149 - DNA, 20 bp, Artificial Sequence
  Description of Artificial Sequence: Synthetic oligonucleotide
gagcatttagacccagtggc

SEQ ID NO: 8150 - DNA, 20 bp, Artificial Sequence
  Description of Artificial Sequence: Synthetic oligonucleotide
agcatttagacccagtggct

SEQ ID NO: 8151 - DNA, 20 bp, Artificial Sequence
  Description of Artificial Sequence: Synthetic oligonucleotide
gcatttagacccagtggctc

SEQ ID NO: 8152 - DNA, 20 bp, Artificial Sequence
  Description of Artificial Sequence: Synthetic oligonucleotide
catttagacccagtggctcc

SEQ ID NO: 8153 - DNA, 20 bp, Artificial Sequence
  Description of Artificial Sequence: Synthetic oligonucleotide
atttagacccagtggctcca

SEQ ID NO: 8154 - DNA, 20 bp, Artificial Sequence
  Description of Artificial Sequence: Synthetic oligonucleotide
tttagacccagtggctccat

SEQ ID NO: 8155 - DNA, 20 bp, Artificial Sequence
  Description of Artificial Sequence: Synthetic oligonucleotide
ttagacccagtggctccatc

SEQ ID NO: 8156 - DNA, 20 bp, Artificial Sequence
  Description of Artificial Sequence: Synthetic oligonucleotide
tagacccagtggctccatct

SEQ ID NO: 8157 - DNA, 20 bp, Artificial Sequence
  Description of Artificial Sequence: Synthetic oligonucleotide
agacccagtggctccatctg

SEQ ID NO: 8158 - DNA, 20 bp, Artificial Sequence
  Description of Artificial Sequence: Synthetic oligonucleotide
gacccagtggctccatctga

SEQ ID NO: 8159 - DNA, 20 bp, Artificial Sequence
  Description of Artificial Sequence: Synthetic oligonucleotide
acccagtggctccatctgag

SEQ ID NO: 8160 - DNA, 20 bp, Artificial Sequence
  Description of Artificial Sequence: Synthetic oligonucleotide
cccagtggctccatctgagt

SEQ ID NO: 8161 - DNA, 20 bp, Artificial Sequence
  Description of Artificial Sequence: Synthetic oligonucleotide
ccagtggctccatctgagtt

SEQ ID NO: 8162 - DNA, 20 bp, Artificial Sequence
  Description of Artificial Sequence: Synthetic oligonucleotide
cagtggctccatctgagttg

SEQ ID NO: 8163 - DNA, 20 bp, Artificial Sequence
  Description of Artificial Sequence: Synthetic oligonucleotide
agtggctccatctgagttga

SEQ ID NO: 8164 - DNA, 20 bp, Artificial Sequence
  Description of Artificial Sequence: Synthetic oligonucleotide
gtggctccatctgagttgag

SEQ ID NO: 8165 - DNA, 20 bp, Artificial Sequence
  Description of Artificial Sequence: Synthetic oligonucleotide
tggctccatctgagttgagt

SEQ ID NO: 8166 - DNA, 20 bp, Artificial Sequence
  Description of Artificial Sequence: Synthetic oligonucleotide
ggctccatctgagttgagtg

SEQ ID NO: 8167 - DNA, 20 bp, Artificial Sequence
  Description of Artificial Sequence: Synthetic oligonucleotide
gctccatctgagttgagtgt

SEQ ID NO: 8168 - DNA, 20 bp, Artificial Sequence
  Description of Artificial Sequence: Synthetic oligonucleotide
ctccatctgagttgagtgtt

SEQ ID NO: 8169 - DNA, 20 bp, Artificial Sequence
  Description of Artificial Sequence: Synthetic oligonucleotide
tccatctgagttgagtgttt

SEQ ID NO: 8170 - DNA, 20 bp, Artificial Sequence
  Description of Artificial Sequence: Synthetic oligonucleotide
ccatctgagttgagtgttta

SEQ ID NO: 8171 - DNA, 20 bp, Artificial Sequence
  Description of Artificial Sequence: Synthetic oligonucleotide
catctgagttgagtgtttag

SEQ ID NO: 8172 - DNA, 20 bp, Artificial Sequence
  Description of Artificial Sequence: Synthetic oligonucleotide
atctgagttgagtgtttaga

SEQ ID NO: 8173 - DNA, 20 bp, Artificial Sequence
  Description of Artificial Sequence: Synthetic oligonucleotide
tctgagttgagtgtttagag

SEQ ID NO: 8174 - DNA, 20 bp, Artificial Sequence
  Description of Artificial Sequence: Synthetic oligonucleotide
ctgagttgagtgtttagaga

SEQ ID NO: 8175 - DNA, 20 bp, Artificial Sequence
  Description of Artificial Sequence: Synthetic oligonucleotide
tgagttgagtgtttagagac

SEQ ID NO: 8176 - DNA, 20 bp, Artificial Sequence
  Description of Artificial Sequence: Synthetic oligonucleotide
gagttgagtgtttagagact

SEQ ID NO: 8177 - DNA, 20 bp, Artificial Sequence
  Description of Artificial Sequence: Synthetic oligonucleotide
agttgagtgtttagagactg

SEQ ID NO: 8178 - DNA, 20 bp, Artificial Sequence
  Description of Artificial Sequence: Synthetic oligonucleotide
gttgagtgtttagagactga

SEQ ID NO: 8179 - DNA, 20 bp, Artificial Sequence
  Description of Artificial Sequence: Synthetic oligonucleotide
ttgagtgtttagagactgag

SEQ ID NO: 8180 - DNA, 20 bp, Artificial Sequence
  Description of Artificial Sequence: Synthetic oligonucleotide
tgagtgtttagagactgagc

SEQ ID NO: 8181 - DNA, 20 bp, Artificial Sequence
  Description of Artificial Sequence: Synthetic oligonucleotide
gagtgtttagagactgagcc

SEQ ID NO: 8182 - DNA, 20 bp, Artificial Sequence
  Description of Artificial Sequence: Synthetic oligonucleotide
agtgtttagagactgagcct

SEQ ID NO: 8183 - DNA, 20 bp, Artificial Sequence
  Description of Artificial Sequence: Synthetic oligonucleotide
gtgtttagagactgagcctt

SEQ ID NO: 8184 - DNA, 20 bp, Artificial Sequence
  Description of Artificial Sequence: Synthetic oligonucleotide
tgtttagagactgagccttt

SEQ ID NO: 8185 - DNA, 20 bp, Artificial Sequence
  Description of Artificial Sequence: Synthetic oligonucleotide
gtttagagactgagccttta

SEQ ID NO: 8186 - DNA, 20 bp, Artificial Sequence
  Description of Artificial Sequence: Synthetic oligonucleotide
tttagagactgagcctttat

SEQ ID NO: 8187 - DNA, 20 bp, Artificial Sequence
  Description of Artificial Sequence: Synthetic oligonucleotide
ttagagactgagcctttatt

SEQ ID NO: 8188 - DNA, 20 bp, Artificial Sequence
  Description of Artificial Sequence: Synthetic oligonucleotide
tagagactgagcctttattt

SEQ ID NO: 8189 - DNA, 20 bp, Artificial Sequence
  Description of Artificial Sequence: Synthetic oligonucleotide
agagactgagcctttatttc

SEQ ID NO: 8190 - DNA, 20 bp, Artificial Sequence
  Description of Artificial Sequence: Synthetic oligonucleotide
gagactgagcctttatttct

SEQ ID NO: 8191 - DNA, 20 bp, Artificial Sequence
  Description of Artificial Sequence: Synthetic oligonucleotide
agactgagcctttatttcta

SEQ ID NO: 8192 - DNA, 20 bp, Artificial Sequence
  Description of Artificial Sequence: Synthetic oligonucleotide
gactgagcctttatttctac

SEQ ID NO: 8193 - DNA, 20 bp, Artificial Sequence
  Description of Artificial Sequence: Synthetic oligonucleotide
actgagcctttatttctacc

SEQ ID NO: 8194 - DNA, 20 bp, Artificial Sequence
  Description of Artificial Sequence: Synthetic oligonucleotide
ctgagcctttatttctaccc

SEQ ID NO: 8195 - DNA, 20 bp, Artificial Sequence
  Description of Artificial Sequence: Synthetic oligonucleotide
tgagcctttatttctaccct

SEQ ID NO: 8196 - DNA, 20 bp, Artificial Sequence
  Description of Artificial Sequence: Synthetic oligonucleotide
gagcctttatttctaccctg

SEQ ID NO: 8197 - DNA, 20 bp, Artificial Sequence
  Description of Artificial Sequence: Synthetic oligonucleotide
agcctttatttctaccctgg

SEQ ID NO: 8198 - DNA, 20 bp, Artificial Sequence
  Description of Artificial Sequence: Synthetic oligonucleotide
gcctttatttctaccctggg

SEQ ID NO: 8199 - DNA, 20 bp, Artificial Sequence
  Description of Artificial Sequence: Synthetic oligonucleotide
cctttatttctaccctggga

SEQ ID NO: 8200 - DNA, 20 bp, Artificial Sequence
  Description of Artificial Sequence: Synthetic oligonucleotide
ctttatttctaccctgggat

SEQ ID NO: 8201 - DNA, 20 bp, Artificial Sequence
  Description of Artificial Sequence: Synthetic oligonucleotide
tttatttctaccctgggatt

SEQ ID NO: 8202 - DNA, 20 bp, Artificial Sequence
  Description of Artificial Sequence: Synthetic oligonucleotide
ttatttctaccctgggattc

SEQ ID NO: 8203 - DNA, 20 bp, Artificial Sequence
  Description of Artificial Sequence: Synthetic oligonucleotide
tatttctaccctgggattct

SEQ ID NO: 8204 - DNA, 20 bp, Artificial Sequence
  Description of Artificial Sequence: Synthetic oligonucleotide
atttctaccctgggattctc

SEQ ID NO: 8205 - DNA, 20 bp, Artificial Sequence
  Description of Artificial Sequence: Synthetic oligonucleotide
tttctaccctgggattctca

SEQ ID NO: 8206 - DNA, 20 bp, Artificial Sequence
  Description of Artificial Sequence: Synthetic oligonucleotide
ttctaccctgggattctcag

SEQ ID NO: 8207 - DNA, 20 bp, Artificial Sequence
  Description of Artificial Sequence: Synthetic oligonucleotide
tctaccctgggattctcagt

SEQ ID NO: 8208 - DNA, 20 bp, Artificial Sequence
  Description of Artificial Sequence: Synthetic oligonucleotide
ctaccctgggattctcagtg

SEQ ID NO: 8209 - DNA, 20 bp, Artificial Sequence
  Description of Artificial Sequence: Synthetic oligonucleotide
taccctgggattctcagtgg

SEQ ID NO: 8210 - DNA, 20 bp, Artificial Sequence
  Description of Artificial Sequence: Synthetic oligonucleotide
accctgggattctcagtggt

SEQ ID NO: 8211 - DNA, 20 bp, Artificial Sequence
  Description of Artificial Sequence: Synthetic oligonucleotide
ccctgggattctcagtggtg

SEQ ID NO: 8212 - DNA, 20 bp, Artificial Sequence
  Description of Artificial Sequence: Synthetic oligonucleotide
cctgggattctcagtggtgt

SEQ ID NO: 8213 - DNA, 20 bp, Artificial Sequence
  Description of Artificial Sequence: Synthetic oligonucleotide
ctgggattctcagtggtgtt

SEQ ID NO: 8214 - DNA, 20 bp, Artificial Sequence
  Description of Artificial Sequence: Synthetic oligonucleotide
tgggattctcagtggtgtta

SEQ ID NO: 8215 - DNA, 20 bp, Artificial Sequence
  Description of Artificial Sequence: Synthetic oligonucleotide
gggattctcagtggtgttaa

SEQ ID NO: 8216 - DNA, 20 bp, Artificial Sequence
  Description of Artificial Sequence: Synthetic oligonucleotide
ggattctcagtggtgttaat

SEQ ID NO: 8217 - DNA, 20 bp, Artificial Sequence
  Description of Artificial Sequence: Synthetic oligonucleotide
gattctcagtggtgttaatt

SEQ ID NO: 8218 - DNA, 20 bp, Artificial Sequence
  Description of Artificial Sequence: Synthetic oligonucleotide
attctcagtggtgttaatta

SEQ ID NO: 8219 - DNA, 20 bp, Artificial Sequence
  Description of Artificial Sequence: Synthetic oligonucleotide
ttctcagtggtgttaattac

SEQ ID NO: 8220 - DNA, 20 bp, Artificial Sequence
  Description of Artificial Sequence: Synthetic oligonucleotide
tctcagtggtgttaattacc

SEQ ID NO: 8221 - DNA, 20 bp, Artificial Sequence
  Description of Artificial Sequence: Synthetic oligonucleotide
ctcagtggtgttaattaccc

SEQ ID NO: 8222 - DNA, 20 bp, Artificial Sequence
  Description of Artificial Sequence: Synthetic oligonucleotide
tcagtggtgttaattaccca

SEQ ID NO: 8223 - DNA, 20 bp, Artificial Sequence
  Description of Artificial Sequence: Synthetic oligonucleotide
cagtggtgttaattacccat

SEQ ID NO: 8224 - DNA, 20 bp, Artificial Sequence
  Description of Artificial Sequence: Synthetic oligonucleotide
agtggtgttaattacccatc

SEQ ID NO: 8225 - DNA, 20 bp, Artificial Sequence
  Description of Artificial Sequence: Synthetic oligonucleotide
gtggtgttaattacccatca

SEQ ID NO: 8226 - DNA, 20 bp, Artificial Sequence
  Description of Artificial Sequence: Synthetic oligonucleotide
tggtgttaattacccatcag

SEQ ID NO: 8227 - DNA, 20 bp, Artificial Sequence
  Description of Artificial Sequence: Synthetic oligonucleotide
ggtgttaattacccatcagt

SEQ ID NO: 8228 - DNA, 20 bp, Artificial Sequence
  Description of Artificial Sequence: Synthetic oligonucleotide
gtgttaattacccatcagtg

SEQ ID NO: 8229 - DNA, 20 bp, Artificial Sequence
  Description of Artificial Sequence: Synthetic oligonucleotide
tgttaattacccatcagtgt

SEQ ID NO: 8230 - DNA, 20 bp, Artificial Sequence
  Description of Artificial Sequence: Synthetic oligonucleotide
gttaattacccatcagtgtc

SEQ ID NO: 8231 - DNA, 20 bp, Artificial Sequence
  Description of Artificial Sequence: Synthetic oligonucleotide
ttaattacccatcagtgtct

SEQ ID NO: 8232 - DNA, 20 bp, Artificial Sequence
  Description of Artificial Sequence: Synthetic oligonucleotide
taattacccatcagtgtctg

SEQ ID NO: 8233 - DNA, 20 bp, Artificial Sequence
  Description of Artificial Sequence: Synthetic oligonucleotide
aattacccatcagtgtctgc

SEQ ID NO: 8234 - DNA, 20 bp, Artificial Sequence
  Description of Artificial Sequence: Synthetic oligonucleotide
attacccatcagtgtctgca

SEQ ID NO: 8235 - DNA, 20 bp, Artificial Sequence
  Description of Artificial Sequence: Synthetic oligonucleotide
ttacccatcagtgtctgcat

SEQ ID NO: 8236 - DNA, 20 bp, Artificial Sequence
  Description of Artificial Sequence: Synthetic oligonucleotide
tacccatcagtgtctgcatt

SEQ ID NO: 8237 - DNA, 20 bp, Artificial Sequence
  Description of Artificial Sequence: Synthetic oligonucleotide
acccatcagtgtctgcattt

SEQ ID NO: 8238 - DNA, 20 bp, Artificial Sequence
  Description of Artificial Sequence: Synthetic oligonucleotide
cccatcagtgtctgcatttg

SEQ ID NO: 8239 - DNA, 20 bp, Artificial Sequence
  Description of Artificial Sequence: Synthetic oligonucleotide
ccatcagtgtctgcatttgg

SEQ ID NO: 8240 - DNA, 20 bp, Artificial Sequence
  Description of Artificial Sequence: Synthetic oligonucleotide
catcagtgtctgcatttggg

SEQ ID NO: 8241 - DNA, 20 bp, Artificial Sequence
  Description of Artificial Sequence: Synthetic oligonucleotide
atcagtgtctgcatttggga

SEQ ID NO: 8242 - DNA, 20 bp, Artificial Sequence
  Description of Artificial Sequence: Synthetic oligonucleotide
tcagtgtctgcatttgggag

SEQ ID NO: 8243 - DNA, 20 bp, Artificial Sequence
  Description of Artificial Sequence: Synthetic oligonucleotide
cagtgtctgcatttgggaga

SEQ ID NO: 8244 - DNA, 20 bp, Artificial Sequence
  Description of Artificial Sequence: Synthetic oligonucleotide
agtgtctgcatttgggagag

SEQ ID NO: 8245 - DNA, 20 bp, Artificial Sequence
  Description of Artificial Sequence: Synthetic oligonucleotide
gtgtctgcatttgggagagg

SEQ ID NO: 8246 - DNA, 20 bp, Artificial Sequence
  Description of Artificial Sequence: Synthetic oligonucleotide
tgtctgcatttgggagaggt

SEQ ID NO: 8247 - DNA, 20 bp, Artificial Sequence
  Description of Artificial Sequence: Synthetic oligonucleotide
gtctgcatttgggagaggtg

SEQ ID NO: 8248 - DNA, 20 bp, Artificial Sequence
  Description of Artificial Sequence: Synthetic oligonucleotide
tctgcatttgggagaggtgg

SEQ ID NO: 8249 - DNA, 20 bp, Artificial Sequence
  Description of Artificial Sequence: Synthetic oligonucleotide
ctgcatttgggagaggtgga

SEQ ID NO: 8250 - DNA, 20 bp, Artificial Sequence
  Description of Artificial Sequence: Synthetic oligonucleotide
tgcatttgggagaggtggat

SEQ ID NO: 8251 - DNA, 20 bp, Artificial Sequence
  Description of Artificial Sequence: Synthetic oligonucleotide
gcatttgggagaggtggata

SEQ ID NO: 8252 - DNA, 20 bp, Artificial Sequence
  Description of Artificial Sequence: Synthetic oligonucleotide
catttgggagaggtggatat

SEQ ID NO: 8253 - DNA, 20 bp, Artificial Sequence
  Description of Artificial Sequence: Synthetic oligonucleotide
atttgggagaggtggatatg

SEQ ID NO: 8254 - DNA, 20 bp, Artificial Sequence
  Description of Artificial Sequence: Synthetic oligonucleotide
tttgggagaggtggatatgg

SEQ ID NO: 8255 - DNA, 20 bp, Artificial Sequence
  Description of Artificial Sequence: Synthetic oligonucleotide
ttgggagaggtggatatggg

SEQ ID NO: 8256 - DNA, 20 bp, Artificial Sequence
  Description of Artificial Sequence: Synthetic oligonucleotide
tgggagaggtggatatgggg

SEQ ID NO: 8257 - DNA, 20 bp, Artificial Sequence
  Description of Artificial Sequence: Synthetic oligonucleotide
gggagaggtggatatgggga

SEQ ID NO: 8258 - DNA, 20 bp, Artificial Sequence
  Description of Artificial Sequence: Synthetic oligonucleotide
ggagaggtggatatggggag

SEQ ID NO: 8259 - DNA, 20 bp, Artificial Sequence
  Description of Artificial Sequence: Synthetic oligonucleotide
gagaggtggatatggggaga

SEQ ID NO: 8260 - DNA, 20 bp, Artificial Sequence
  Description of Artificial Sequence: Synthetic oligonucleotide
agaggtggatatggggagat

SEQ ID NO: 8261 - DNA, 20 bp, Artificial Sequence
  Description of Artificial Sequence: Synthetic oligonucleotide
gaggtggatatggggagatc

SEQ ID NO: 8262 - DNA, 20 bp, Artificial Sequence
  Description of Artificial Sequence: Synthetic oligonucleotide
aggtggatatggggagatcc

SEQ ID NO: 8263 - DNA, 20 bp, Artificial Sequence
  Description of Artificial Sequence: Synthetic oligonucleotide
ggtggatatggggagatcca

SEQ ID NO: 8264 - DNA, 20 bp, Artificial Sequence
  Description of Artificial Sequence: Synthetic oligonucleotide
gtggatatggggagatccag

SEQ ID NO: 8265 - DNA, 20 bp, Artificial Sequence
  Description of Artificial Sequence: Synthetic oligonucleotide
tggatatggggagatccaga

SEQ ID NO: 8266 - DNA, 20 bp, Artificial Sequence
  Description of Artificial Sequence: Synthetic oligonucleotide
ggatatggggagatccagag

SEQ ID NO: 8267 - DNA, 20 bp, Artificial Sequence
  Description of Artificial Sequence: Synthetic oligonucleotide
gatatggggagatccagagg

SEQ ID NO: 8268 - DNA, 20 bp, Artificial Sequence
  Description of Artificial Sequence: Synthetic oligonucleotide
atatggggagatccagaggg

SEQ ID NO: 8269 - DNA, 20 bp, Artificial Sequence
  Description of Artificial Sequence: Synthetic oligonucleotide
tatggggagatccagagggg

SEQ ID NO: 8270 - DNA, 20 bp, Artificial Sequence
  Description of Artificial Sequence: Synthetic oligonucleotide
atggggagatccagaggggg

SEQ ID NO: 8271 - DNA, 20 bp, Artificial Sequence
  Description of Artificial Sequence: Synthetic oligonucleotide
tggggagatccagagggggt

SEQ ID NO: 8272 - DNA, 20 bp, Artificial Sequence
  Description of Artificial Sequence: Synthetic oligonucleotide
ggggagatccagagggggtg

SEQ ID NO: 8273 - DNA, 20 bp, Artificial Sequence
  Description of Artificial Sequence: Synthetic oligonucleotide
gggagatccagagggggtgt

SEQ ID NO: 8274 - DNA, 20 bp, Artificial Sequence
  Description of Artificial Sequence: Synthetic oligonucleotide
ggagatccagagggggtgta

SEQ ID NO: 8275 - DNA, 20 bp, Artificial Sequence
  Description of Artificial Sequence: Synthetic oligonucleotide
gagatccagagggggtgtat

SEQ ID NO: 8276 - DNA, 20 bp, Artificial Sequence
  Description of Artificial Sequence: Synthetic oligonucleotide
agatccagagggggtgtatt

SEQ ID NO: 8277 - DNA, 20 bp, Artificial Sequence
  Description of Artificial Sequence: Synthetic oligonucleotide
gatccagagggggtgtattt

SEQ ID NO: 8278 - DNA, 20 bp, Artificial Sequence
  Description of Artificial Sequence: Synthetic oligonucleotide
atccagagggggtgtatttt

SEQ ID NO: 8279 - DNA, 20 bp, Artificial Sequence
  Description of Artificial Sequence: Synthetic oligonucleotide
tccagagggggtgtattttg

SEQ ID NO: 8280 - DNA, 20 bp, Artificial Sequence
  Description of Artificial Sequence: Synthetic oligonucleotide
ccagagggggtgtattttgg

SEQ ID NO: 8281 - DNA, 20 bp, Artificial Sequence
  Description of Artificial Sequence: Synthetic oligonucleotide
cagagggggtgtattttggc

SEQ ID NO: 8282 - DNA, 20 bp, Artificial Sequence
  Description of Artificial Sequence: Synthetic oligonucleotide
agagggggtgtattttggct

SEQ ID NO: 8283 - DNA, 20 bp, Artificial Sequence
  Description of Artificial Sequence: Synthetic oligonucleotide
gagggggtgtattttggctt

SEQ ID NO: 8284 - DNA, 20 bp, Artificial Sequence
  Description of Artificial Sequence: Synthetic oligonucleotide
agggggtgtattttggcttt

SEQ ID NO: 8285 - DNA, 20 bp, Artificial Sequence
  Description of Artificial Sequence: Synthetic oligonucleotide
gggggtgtattttggcttta

SEQ ID NO: 8286 - DNA, 20 bp, Artificial Sequence
  Description of Artificial Sequence: Synthetic oligonucleotide
ggggtgtattttggctttac

SEQ ID NO: 8287 - DNA, 20 bp, Artificial Sequence
  Description of Artificial Sequence: Synthetic oligonucleotide
gggtgtattttggctttact

SEQ ID NO: 8288 - DNA, 20 bp, Artificial Sequence
  Description of Artificial Sequence: Synthetic oligonucleotide
ggtgtattttggctttacta

SEQ ID NO: 8289 - DNA, 20 bp, Artificial Sequence
  Description of Artificial Sequence: Synthetic oligonucleotide
gtgtattttggctttactag

SEQ ID NO: 8290 - DNA, 20 bp, Artificial Sequence
  Description of Artificial Sequence: Synthetic oligonucleotide
tgtattttggctttactagc

SEQ ID NO: 8291 - DNA, 20 bp, Artificial Sequence
  Description of Artificial Sequence: Synthetic oligonucleotide
gtattttggctttactagcg

SEQ ID NO: 8292 - DNA, 20 bp, Artificial Sequence
  Description of Artificial Sequence: Synthetic oligonucleotide
tattttggctttactagcgg

SEQ ID NO: 8293 - DNA, 20 bp, Artificial Sequence
  Description of Artificial Sequence: Synthetic oligonucleotide
attttggctttactagcggt

SEQ ID NO: 8294 - DNA, 20 bp, Artificial Sequence
  Description of Artificial Sequence: Synthetic oligonucleotide
ttttggctttactagcggtg

SEQ ID NO: 8295 - DNA, 20 bp, Artificial Sequence
  Description of Artificial Sequence: Synthetic oligonucleotide
tttggctttactagcggtgg

SEQ ID NO: 8296 - DNA, 20 bp, Artificial Sequence
  Description of Artificial Sequence: Synthetic oligonucleotide
ttggctttactagcggtgga

SEQ ID NO: 8297 - DNA, 20 bp, Artificial Sequence
  Description of Artificial Sequence: Synthetic oligonucleotide
tggctttactagcggtggag

SEQ ID NO: 8298 - DNA, 20 bp, Artificial Sequence
  Description of Artificial Sequence: Synthetic oligonucleotide
ggctttactagcggtggagc

SEQ ID NO: 8299 - DNA, 20 bp, Artificial Sequence
  Description of Artificial Sequence: Synthetic oligonucleotide
gctttactagcggtggagca

SEQ ID NO: 8300 - DNA, 20 bp, Artificial Sequence
  Description of Artificial Sequence: Synthetic oligonucleotide
ctttactagcggtggagcag

SEQ ID NO: 8301 - DNA, 20 bp, Artificial Sequence
  Description of Artificial Sequence: Synthetic oligonucleotide
tttactagcggtggagcaga

SEQ ID NO: 8302 - DNA, 20 bp, Artificial Sequence
  Description of Artificial Sequence: Synthetic oligonucleotide
ttactagcggtggagcagag

SEQ ID NO: 8303 - DNA, 20 bp, Artificial Sequence
  Description of Artificial Sequence: Synthetic oligonucleotide
tactagcggtggagcagagg

SEQ ID NO: 8304 - DNA, 20 bp, Artificial Sequence
  Description of Artificial Sequence: Synthetic oligonucleotide
actagcggtggagcagaggg

SEQ ID NO: 8305 - DNA, 20 bp, Artificial Sequence
  Description of Artificial Sequence: Synthetic oligonucleotide
ctagcggtggagcagagggg

SEQ ID NO: 8306 - DNA, 20 bp, Artificial Sequence
  Description of Artificial Sequence: Synthetic oligonucleotide
tagcggtggagcagaggggt

SEQ ID NO: 8307 - DNA, 20 bp, Artificial Sequence
  Description of Artificial Sequence: Synthetic oligonucleotide
agcggtggagcagaggggta

SEQ ID NO: 8308 - DNA, 20 bp, Artificial Sequence
  Description of Artificial Sequence: Synthetic oligonucleotide
gcggtggagcagaggggtag

SEQ ID NO: 8309 - DNA, 20 bp, Artificial Sequence
  Description of Artificial Sequence: Synthetic oligonucleotide
cggtggagcagaggggtagg

SEQ ID NO: 8310 - DNA, 20 bp, Artificial Sequence
  Description of Artificial Sequence: Synthetic oligonucleotide
ggtggagcagaggggtaggg

SEQ ID NO: 8311 - DNA, 20 bp, Artificial Sequence
  Description of Artificial Sequence: Synthetic oligonucleotide
gtggagcagaggggtaggga

SEQ ID NO: 8312 - DNA, 20 bp, Artificial Sequence
  Description of Artificial Sequence: Synthetic oligonucleotide
tggagcagaggggtagggaa

SEQ ID NO: 8313 - DNA, 20 bp, Artificial Sequence
  Description of Artificial Sequence: Synthetic oligonucleotide
ggagcagaggggtagggaag

SEQ ID NO: 8314 - DNA, 20 bp, Artificial Sequence
  Description of Artificial Sequence: Synthetic oligonucleotide
gagcagaggggtagggaagc

SEQ ID NO: 8315 - DNA, 20 bp, Artificial Sequence
  Description of Artificial Sequence: Synthetic oligonucleotide
agcagaggggtagggaagcc

SEQ ID NO: 8316 - DNA, 20 bp, Artificial Sequence
  Description of Artificial Sequence: Synthetic oligonucleotide
gcagaggggtagggaagccc

SEQ ID NO: 8317 - DNA, 20 bp, Artificial Sequence
  Description of Artificial Sequence: Synthetic oligonucleotide
cagaggggtagggaagccct

SEQ ID NO: 8318 - DNA, 20 bp, Artificial Sequence
  Description of Artificial Sequence: Synthetic oligonucleotide
agaggggtagggaagccctt

SEQ ID NO: 8319 - DNA, 20 bp, Artificial Sequence
  Description of Artificial Sequence: Synthetic oligonucleotide
gaggggtagggaagcccttc

SEQ ID NO: 8320 - DNA, 20 bp, Artificial Sequence
  Description of Artificial Sequence: Synthetic oligonucleotide
aggggtagggaagcccttca

SEQ ID NO: 8321 - DNA, 20 bp, Artificial Sequence
  Description of Artificial Sequence: Synthetic oligonucleotide
ggggtagggaagcccttcac

SEQ ID NO: 8322 - DNA, 20 bp, Artificial Sequence
  Description of Artificial Sequence: Synthetic oligonucleotide
gggtagggaagcccttcacc

SEQ ID NO: 8323 - DNA, 20 bp, Artificial Sequence
  Description of Artificial Sequence: Synthetic oligonucleotide
ggtagggaagcccttcacct

SEQ ID NO: 8324 - DNA, 20 bp, Artificial Sequence
  Description of Artificial Sequence: Synthetic oligonucleotide
gtagggaagcccttcacctg

SEQ ID NO: 8325 - DNA, 20 bp, Artificial Sequence
  Description of Artificial Sequence: Synthetic oligonucleotide
tagggaagcccttcacctgg

SEQ ID NO: 8326 - DNA, 20 bp, Artificial Sequence
  Description of Artificial Sequence: Synthetic oligonucleotide
agggaagcccttcacctgga

SEQ ID NO: 8327 - DNA, 20 bp, Artificial Sequence
  Description of Artificial Sequence: Synthetic oligonucleotide
gggaagcccttcacctggat

SEQ ID NO: 8328 - DNA, 20 bp, Artificial Sequence
  Description of Artificial Sequence: Synthetic oligonucleotide
ggaagcccttcacctggata

SEQ ID NO: 8329 - DNA, 20 bp, Artificial Sequence
  Description of Artificial Sequence: Synthetic oligonucleotide
gaagcccttcacctggatag

SEQ ID NO: 8330 - DNA, 20 bp, Artificial Sequence
  Description of Artificial Sequence: Synthetic oligonucleotide
aagcccttcacctggatagc

SEQ ID NO: 8331 - DNA, 20 bp, Artificial Sequence
  Description of Artificial Sequence: Synthetic oligonucleotide
agcccttcacctggatagca

SEQ ID NO: 8332 - DNA, 20 bp, Artificial Sequence
  Description of Artificial Sequence: Synthetic oligonucleotide
gcccttcacctggatagcat

SEQ ID NO: 8333 - DNA, 20 bp, Artificial Sequence
  Description of Artificial Sequence: Synthetic oligonucleotide
cccttcacctggatagcatt

SEQ ID NO: 8334 - DNA, 20 bp, Artificial Sequence
  Description of Artificial Sequence: Synthetic oligonucleotide
ccttcacctggatagcatta

SEQ ID NO: 8335 - DNA, 20 bp, Artificial Sequence
  Description of Artificial Sequence: Synthetic oligonucleotide
cttcacctggatagcattag

SEQ ID NO: 8336 - DNA, 20 bp, Artificial Sequence
  Description of Artificial Sequence: Synthetic oligonucleotide
ttcacctggatagcattagt

SEQ ID NO: 8337 - DNA, 20 bp, Artificial Sequence
  Description of Artificial Sequence: Synthetic oligonucleotide
tcacctggatagcattagtg

SEQ ID NO: 8338 - DNA, 20 bp, Artificial Sequence
  Description of Artificial Sequence: Synthetic oligonucleotide
cacctggatagcattagtgg

SEQ ID NO: 8339 - DNA, 20 bp, Artificial Sequence
  Description of Artificial Sequence: Synthetic oligonucleotide
acctggatagcattagtggg

SEQ ID NO: 8340 - DNA, 20 bp, Artificial Sequence
  Description of Artificial Sequence: Synthetic oligonucleotide
cctggatagcattagtggga

SEQ ID NO: 8341 - DNA, 20 bp, Artificial Sequence
  Description of Artificial Sequence: Synthetic oligonucleotide
ctggatagcattagtgggac

SEQ ID NO: 8342 - DNA, 20 bp, Artificial Sequence
  Description of Artificial Sequence: Synthetic oligonucleotide
tggatagcattagtgggacg

SEQ ID NO: 8343 - DNA, 20 bp, Artificial Sequence
  Description of Artificial Sequence: Synthetic oligonucleotide
ggatagcattagtgggacgt

SEQ ID NO: 8344 - DNA, 20 bp, Artificial Sequence
  Description of Artificial Sequence: Synthetic oligonucleotide
gatagcattagtgggacgtt

SEQ ID NO: 8345 - DNA, 20 bp, Artificial Sequence
  Description of Artificial Sequence: Synthetic oligonucleotide
atagcattagtgggacgttc

SEQ ID NO: 8346 - DNA, 20 bp, Artificial Sequence
  Description of Artificial Sequence: Synthetic oligonucleotide
tagcattagtgggacgttcc

SEQ ID NO: 8347 - DNA, 20 bp, Artificial Sequence
  Description of Artificial Sequence: Synthetic oligonucleotide
agcattagtgggacgttcca

SEQ ID NO: 8348 - DNA, 20 bp, Artificial Sequence
  Description of Artificial Sequence: Synthetic oligonucleotide
gcattagtgggacgttccaa

SEQ ID NO: 8349 - DNA, 20 bp, Artificial Sequence
  Description of Artificial Sequence: Synthetic oligonucleotide
cattagtgggacgttccaac

SEQ ID NO: 8350 - DNA, 20 bp, Artificial Sequence
  Description of Artificial Sequence: Synthetic oligonucleotide
attagtgggacgttccaaca

SEQ ID NO: 8351 - DNA, 20 bp, Artificial Sequence
  Description of Artificial Sequence: Synthetic oligonucleotide
ttagtgggacgttccaacag

SEQ ID NO: 8352 - DNA, 20 bp, Artificial Sequence
  Description of Artificial Sequence: Synthetic oligonucleotide
tagtgggacgttccaacagg

SEQ ID NO: 8353 - DNA, 20 bp, Artificial Sequence
  Description of Artificial Sequence: Synthetic oligonucleotide
agtgggacgttccaacaggt

SEQ ID NO: 8354 - DNA, 20 bp, Artificial Sequence
  Description of Artificial Sequence: Synthetic oligonucleotide
gtgggacgttccaacaggtg

SEQ ID NO: 8355 - DNA, 20 bp, Artificial Sequence
  Description of Artificial Sequence: Synthetic oligonucleotide
tgggacgttccaacaggtgg

SEQ ID NO: 8356 - DNA, 20 bp, Artificial Sequence
  Description of Artificial Sequence: Synthetic oligonucleotide
gggacgttccaacaggtggt

SEQ ID NO: 8357 - DNA, 20 bp, Artificial Sequence
  Description of Artificial Sequence: Synthetic oligonucleotide
ggacgttccaacaggtggtt

SEQ ID NO: 8358 - DNA, 20 bp, Artificial Sequence
  Description of Artificial Sequence: Synthetic oligonucleotide
gacgttccaacaggtggttt

SEQ ID NO: 8359 - DNA, 20 bp, Artificial Sequence
  Description of Artificial Sequence: Synthetic oligonucleotide
acgttccaacaggtggtttc

SEQ ID NO: 8360 - DNA, 20 bp, Artificial Sequence
  Description of Artificial Sequence: Synthetic oligonucleotide
cgttccaacaggtggtttca

SEQ ID NO: 8361 - DNA, 20 bp, Artificial Sequence
  Description of Artificial Sequence: Synthetic oligonucleotide
gttccaacaggtggtttcag

SEQ ID NO: 8362 - DNA, 20 bp, Artificial Sequence
  Description of Artificial Sequence: Synthetic oligonucleotide
ttccaacaggtggtttcagg

SEQ ID NO: 8363 - DNA, 20 bp, Artificial Sequence
  Description of Artificial Sequence: Synthetic oligonucleotide
tccaacaggtggtttcaggt

SEQ ID NO: 8364 - DNA, 20 bp, Artificial Sequence
  Description of Artificial Sequence: Synthetic oligonucleotide
ccaacaggtggtttcaggtt

SEQ ID NO: 8365 - DNA, 20 bp, Artificial Sequence
  Description of Artificial Sequence: Synthetic oligonucleotide
caacaggtggtttcaggtta

SEQ ID NO: 8366 - DNA, 20 bp, Artificial Sequence
  Description of Artificial Sequence: Synthetic oligonucleotide
aacaggtggtttcaggttaa

SEQ ID NO: 8367 - DNA, 20 bp, Artificial Sequence
  Description of Artificial Sequence: Synthetic oligonucleotide
acaggtggtttcaggttaac

SEQ ID NO: 8368 - DNA, 20 bp, Artificial Sequence
  Description of Artificial Sequence: Synthetic oligonucleotide
caggtggtttcaggttaact

SEQ ID NO: 8369 - DNA, 20 bp, Artificial Sequence
  Description of Artificial Sequence: Synthetic oligonucleotide
aggtggtttcaggttaactc

SEQ ID NO: 8370 - DNA, 20 bp, Artificial Sequence
  Description of Artificial Sequence: Synthetic oligonucleotide
ggtggtttcaggttaactct

SEQ ID NO: 8371 - DNA, 20 bp, Artificial Sequence
  Description of Artificial Sequence: Synthetic oligonucleotide
gtggtttcaggttaactctg

SEQ ID NO: 8372 - DNA, 20 bp, Artificial Sequence
  Description of Artificial Sequence: Synthetic oligonucleotide
tggtttcaggttaactctga

SEQ ID NO: 8373 - DNA, 20 bp, Artificial Sequence
  Description of Artificial Sequence: Synthetic oligonucleotide
ggtttcaggttaactctgaa

SEQ ID NO: 8374 - DNA, 20 bp, Artificial Sequence
  Description of Artificial Sequence: Synthetic oligonucleotide
gtttcaggttaactctgaaa

SEQ ID NO: 8375 - DNA, 20 bp, Artificial Sequence
  Description of Artificial Sequence: Synthetic oligonucleotide
tttcaggttaactctgaaat

SEQ ID NO: 8376 - DNA, 20 bp, Artificial Sequence
  Description of Artificial Sequence: Synthetic oligonucleotide
ttcaggttaactctgaaata

SEQ ID NO: 8377 - DNA, 20 bp, Artificial Sequence
  Description of Artificial Sequence: Synthetic oligonucleotide
tcaggttaactctgaaataa

SEQ ID NO: 8378 - DNA, 20 bp, Artificial Sequence
  Description of Artificial Sequence: Synthetic oligonucleotide
caggttaactctgaaataaa

SEQ ID NO: 8379 - DNA, 20 bp, Artificial Sequence
  Description of Artificial Sequence: Synthetic oligonucleotide
aggttaactctgaaataaat

SEQ ID NO: 8380 - DNA, 20 bp, Artificial Sequence
  Description of Artificial Sequence: Synthetic oligonucleotide
ggttaactctgaaataaatt

SEQ ID NO: 8381 - DNA, 20 bp, Artificial Sequence
  Description of Artificial Sequence: Synthetic oligonucleotide
gttaactctgaaataaatta

SEQ ID NO: 8382 - DNA, 20 bp, Artificial Sequence
  Description of Artificial Sequence: Synthetic oligonucleotide
ttaactctgaaataaattat

SEQ ID NO: 8383 - DNA, 20 bp, Artificial Sequence
  Description of Artificial Sequence: Synthetic oligonucleotide
taactctgaaataaattatt

SEQ ID NO: 8384 - DNA, 20 bp, Artificial Sequence
  Description of Artificial Sequence: Synthetic oligonucleotide
aactctgaaataaattattc

SEQ ID NO: 8385 - DNA, 20 bp, Artificial Sequence
  Description of Artificial Sequence: Synthetic oligonucleotide
actctgaaataaattattct

SEQ ID NO: 8386 - DNA, 20 bp, Artificial Sequence
  Description of Artificial Sequence: Synthetic oligonucleotide
ctctgaaataaattattctg

SEQ ID NO: 8387 - DNA, 20 bp, Artificial Sequence
  Description of Artificial Sequence: Synthetic oligonucleotide
tctgaaataaattattctgc

SEQ ID NO: 8388 - DNA, 20 bp, Artificial Sequence
  Description of Artificial Sequence: Synthetic oligonucleotide
ctgaaataaattattctgct

SEQ ID NO: 8389 - DNA, 20 bp, Artificial Sequence
  Description of Artificial Sequence: Synthetic oligonucleotide
tgaaataaattattctgcta

SEQ ID NO: 8390 - DNA, 20 bp, Artificial Sequence
  Description of Artificial Sequence: Synthetic oligonucleotide
gaaataaattattctgctat

SEQ ID NO: 8391 - DNA, 20 bp, Artificial Sequence
  Description of Artificial Sequence: Synthetic oligonucleotide
aaataaattattctgctata

SEQ ID NO: 8392 - DNA, 20 bp, Artificial Sequence
  Description of Artificial Sequence: Synthetic oligonucleotide
aataaattattctgctatag

SEQ ID NO: 8393 - DNA, 20 bp, Artificial Sequence
  Description of Artificial Sequence: Synthetic oligonucleotide
ataaattattctgctatagc

SEQ ID NO: 8394 - DNA, 20 bp, Artificial Sequence
  Description of Artificial Sequence: Synthetic oligonucleotide
taaattattctgctatagct

SEQ ID NO: 8395 - DNA, 20 bp, Artificial Sequence
  Description of Artificial Sequence: Synthetic oligonucleotide
aaattattctgctatagctg

SEQ ID NO: 8396 - DNA, 20 bp, Artificial Sequence
  Description of Artificial Sequence: Synthetic oligonucleotide
aattattctgctatagctgg

SEQ ID NO: 8397 - DNA, 20 bp, Artificial Sequence
  Description of Artificial Sequence: Synthetic oligonucleotide
attattctgctatagctggg

SEQ ID NO: 8398 - DNA, 20 bp, Artificial Sequence
  Description of Artificial Sequence: Synthetic oligonucleotide
ttattctgctatagctgggc

SEQ ID NO: 8399 - DNA, 20 bp, Artificial Sequence
  Description of Artificial Sequence: Synthetic oligonucleotide
tattctgctatagctgggcc

SEQ ID NO: 8400 - DNA, 20 bp, Artificial Sequence
  Description of Artificial Sequence: Synthetic oligonucleotide
attctgctatagctgggcca

SEQ ID NO: 8401 - DNA, 20 bp, Artificial Sequence
  Description of Artificial Sequence: Synthetic oligonucleotide
ttctgctatagctgggccat

SEQ ID NO: 8402 - DNA, 20 bp, Artificial Sequence
  Description of Artificial Sequence: Synthetic oligonucleotide
tctgctatagctgggccatg

SEQ ID NO: 8403 - DNA, 20 bp, Artificial Sequence
  Description of Artificial Sequence: Synthetic oligonucleotide
ctgctatagctgggccatga

SEQ ID NO: 8404 - DNA, 20 bp, Artificial Sequence
  Description of Artificial Sequence: Synthetic oligonucleotide
tgctatagctgggccatgaa

SEQ ID NO: 8405 - DNA, 20 bp, Artificial Sequence
  Description of Artificial Sequence: Synthetic oligonucleotide
gctatagctgggccatgaat

SEQ ID NO: 8406 - DNA, 20 bp, Artificial Sequence
  Description of Artificial Sequence: Synthetic oligonucleotide
ctatagctgggccatgaatt

SEQ ID NO: 8407 - DNA, 20 bp, Artificial Sequence
  Description of Artificial Sequence: Synthetic oligonucleotide
tatagctgggccatgaattc

SEQ ID NO: 8408 - DNA, 20 bp, Artificial Sequence
  Description of Artificial Sequence: Synthetic oligonucleotide
atagctgggccatgaattct

SEQ ID NO: 8409 - DNA, 20 bp, Artificial Sequence
  Description of Artificial Sequence: Synthetic oligonucleotide
tagctgggccatgaattcta

SEQ ID NO: 8410 - DNA, 20 bp, Artificial Sequence
  Description of Artificial Sequence: Synthetic oligonucleotide
agctgggccatgaattctag

SEQ ID NO: 8411 - DNA, 20 bp, Artificial Sequence
  Description of Artificial Sequence: Synthetic oligonucleotide
gctgggccatgaattctaga

SEQ ID NO: 8412 - DNA, 20 bp, Artificial Sequence
  Description of Artificial Sequence: Synthetic oligonucleotide
ctgggccatgaattctagaa

SEQ ID NO: 8413 - DNA, 20 bp, Artificial Sequence
  Description of Artificial Sequence: Synthetic oligonucleotide
tgggccatgaattctagaaa

SEQ ID NO: 8414 - DNA, 20 bp, Artificial Sequence
  Description of Artificial Sequence: Synthetic oligonucleotide
gggccatgaattctagaaat

SEQ ID NO: 8415 - DNA, 20 bp, Artificial Sequence
  Description of Artificial Sequence: Synthetic oligonucleotide
ggccatgaattctagaaatg

SEQ ID NO: 8416 - DNA, 20 bp, Artificial Sequence
  Description of Artificial Sequence: Synthetic oligonucleotide
gccatgaattctagaaatgt

SEQ ID NO: 8417 - DNA, 20 bp, Artificial Sequence
  Description of Artificial Sequence: Synthetic oligonucleotide
ccatgaattctagaaatgtt

SEQ ID NO: 8418 - DNA, 20 bp, Artificial Sequence
  Description of Artificial Sequence: Synthetic oligonucleotide
catgaattctagaaatgtta

SEQ ID NO: 8419 - DNA, 20 bp, Artificial Sequence
  Description of Artificial Sequence: Synthetic oligonucleotide
atgaattctagaaatgttac

SEQ ID NO: 8420 - DNA, 20 bp, Artificial Sequence
  Description of Artificial Sequence: Synthetic oligonucleotide
tgaattctagaaatgttaca

SEQ ID NO: 8421 - DNA, 20 bp, Artificial Sequence
  Description of Artificial Sequence: Synthetic oligonucleotide
gaattctagaaatgttacag

SEQ ID NO: 8422 - DNA, 20 bp, Artificial Sequence
  Description of Artificial Sequence: Synthetic oligonucleotide
aattctagaaatgttacagt

SEQ ID NO: 8423 - DNA, 20 bp, Artificial Sequence
  Description of Artificial Sequence: Synthetic oligonucleotide
attctagaaatgttacagtg

SEQ ID NO: 8424 - DNA, 20 bp, Artificial Sequence
  Description of Artificial Sequence: Synthetic oligonucleotide
ttctagaaatgttacagtgt

SEQ ID NO: 8425 - DNA, 20 bp, Artificial Sequence
  Description of Artificial Sequence: Synthetic oligonucleotide
tctagaaatgttacagtgta

SEQ ID NO: 8426 - DNA, 20 bp, Artificial Sequence
  Description of Artificial Sequence: Synthetic oligonucleotide
ctagaaatgttacagtgtat

SEQ ID NO: 8427 - DNA, 20 bp, Artificial Sequence
  Description of Artificial Sequence: Synthetic oligonucleotide
tagaaatgttacagtgtatg

SEQ ID NO: 8428 - DNA, 20 bp, Artificial Sequence
  Description of Artificial Sequence: Synthetic oligonucleotide
agaaatgttacagtgtatga

SEQ ID NO: 8429 - DNA, 20 bp, Artificial Sequence
  Description of Artificial Sequence: Synthetic oligonucleotide
gaaatgttacagtgtatgag

SEQ ID NO: 8430 - DNA, 20 bp, Artificial Sequence
  Description of Artificial Sequence: Synthetic oligonucleotide
aaatgttacagtgtatgagg

SEQ ID NO: 8431 - DNA, 20 bp, Artificial Sequence
  Description of Artificial Sequence: Synthetic oligonucleotide
aatgttacagtgtatgaggg

SEQ ID NO: 8432 - DNA, 20 bp, Artificial Sequence
  Description of Artificial Sequence: Synthetic oligonucleotide
atgttacagtgtatgagggc

SEQ ID NO: 8433 - DNA, 20 bp, Artificial Sequence
  Description of Artificial Sequence: Synthetic oligonucleotide
tgttacagtgtatgagggcc

SEQ ID NO: 8434 - DNA, 20 bp, Artificial Sequence
  Description of Artificial Sequence: Synthetic oligonucleotide
gttacagtgtatgagggcca

SEQ ID NO: 8435 - DNA, 20 bp, Artificial Sequence
  Description of Artificial Sequence: Synthetic oligonucleotide
ttacagtgtatgagggccac

SEQ ID NO: 8436 - DNA, 20 bp, Artificial Sequence
  Description of Artificial Sequence: Synthetic oligonucleotide
tacagtgtatgagggccacg

SEQ ID NO: 8437 - DNA, 20 bp, Artificial Sequence
  Description of Artificial Sequence: Synthetic oligonucleotide
acagtgtatgagggccacgt

SEQ ID NO: 8438 - DNA, 20 bp, Artificial Sequence
  Description of Artificial Sequence: Synthetic oligonucleotide
cagtgtatgagggccacgta

SEQ ID NO: 8439 - DNA, 20 bp, Artificial Sequence
  Description of Artificial Sequence: Synthetic oligonucleotide
agtgtatgagggccacgtaa

SEQ ID NO: 8440 - DNA, 20 bp, Artificial Sequence
  Description of Artificial Sequence: Synthetic oligonucleotide
gtgtatgagggccacgtaac

SEQ ID NO: 8441 - DNA, 20 bp, Artificial Sequence
  Description of Artificial Sequence: Synthetic oligonucleotide
tgtatgagggccacgtaaca

SEQ ID NO: 8442 - DNA, 20 bp, Artificial Sequence
  Description of Artificial Sequence: Synthetic oligonucleotide
gtatgagggccacgtaacag

SEQ ID NO: 8443 - DNA, 20 bp, Artificial Sequence
  Description of Artificial Sequence: Synthetic oligonucleotide
tatgagggccacgtaacaga

SEQ ID NO: 8444 - DNA, 20 bp, Artificial Sequence
  Description of Artificial Sequence: Synthetic oligonucleotide
atgagggccacgtaacagat

SEQ ID NO: 8445 - DNA, 20 bp, Artificial Sequence
  Description of Artificial Sequence: Synthetic oligonucleotide
tgagggccacgtaacagata

SEQ ID NO: 8446 - DNA, 20 bp, Artificial Sequence
  Description of Artificial Sequence: Synthetic oligonucleotide
gagggccacgtaacagatac

SEQ ID NO: 8447 - DNA, 20 bp, Artificial Sequence
  Description of Artificial Sequence: Synthetic oligonucleotide
agggccacgtaacagatact

SEQ ID NO: 8448 - DNA, 20 bp, Artificial Sequence
  Description of Artificial Sequence: Synthetic oligonucleotide
gggccacgtaacagatactc

SEQ ID NO: 8449 - DNA, 20 bp, Artificial Sequence
  Description of Artificial Sequence: Synthetic oligonucleotide
ggccacgtaacagatactcc

SEQ ID NO: 8450 - DNA, 20 bp, Artificial Sequence
  Description of Artificial Sequence: Synthetic oligonucleotide
gccacgtaacagatactcct

SEQ ID NO: 8451 - DNA, 20 bp, Artificial Sequence
  Description of Artificial Sequence: Synthetic oligonucleotide
ccacgtaacagatactcctg

SEQ ID NO: 8452 - DNA, 20 bp, Artificial Sequence
  Description of Artificial Sequence: Synthetic oligonucleotide
cacgtaacagatactcctgt

SEQ ID NO: 8453 - DNA, 20 bp, Artificial Sequence
  Description of Artificial Sequence: Synthetic oligonucleotide
acgtaacagatactcctgtc

SEQ ID NO: 8454 - DNA, 20 bp, Artificial Sequence
  Description of Artificial Sequence: Synthetic oligonucleotide
cgtaacagatactcctgtca

SEQ ID NO: 8455 - DNA, 20 bp, Artificial Sequence
  Description of Artificial Sequence: Synthetic oligonucleotide
gtaacagatactcctgtcag

SEQ ID NO: 8456 - DNA, 20 bp, Artificial Sequence
  Description of Artificial Sequence: Synthetic oligonucleotide
taacagatactcctgtcaga

SEQ ID NO: 8457 - DNA, 20 bp, Artificial Sequence
  Description of Artificial Sequence: Synthetic oligonucleotide
aacagatactcctgtcagat

SEQ ID NO: 8458 - DNA, 20 bp, Artificial Sequence
  Description of Artificial Sequence: Synthetic oligonucleotide
acagatactcctgtcagata

SEQ ID NO: 8459 - DNA, 20 bp, Artificial Sequence
  Description of Artificial Sequence: Synthetic oligonucleotide
cagatactcctgtcagatag

SEQ ID NO: 8460 - DNA, 20 bp, Artificial Sequence
  Description of Artificial Sequence: Synthetic oligonucleotide
agatactcctgtcagataga

SEQ ID NO: 8461 - DNA, 20 bp, Artificial Sequence
  Description of Artificial Sequence: Synthetic oligonucleotide
gatactcctgtcagatagat

SEQ ID NO: 8462 - DNA, 20 bp, Artificial Sequence
  Description of Artificial Sequence: Synthetic oligonucleotide
atactcctgtcagatagatt

SEQ ID NO: 8463 - DNA, 20 bp, Artificial Sequence
  Description of Artificial Sequence: Synthetic oligonucleotide
tactcctgtcagatagattc

SEQ ID NO: 8464 - DNA, 20 bp, Artificial Sequence
  Description of Artificial Sequence: Synthetic oligonucleotide
actcctgtcagatagattca

SEQ ID NO: 8465 - DNA, 20 bp, Artificial Sequence
  Description of Artificial Sequence: Synthetic oligonucleotide
ctcctgtcagatagattcag

SEQ ID NO: 8466 - DNA, 20 bp, Artificial Sequence
  Description of Artificial Sequence: Synthetic oligonucleotide
tcctgtcagatagattcaga

SEQ ID NO: 8467 - DNA, 20 bp, Artificial Sequence
  Description of Artificial Sequence: Synthetic oligonucleotide
cctgtcagatagattcagac

SEQ ID NO: 8468 - DNA, 20 bp, Artificial Sequence
  Description of Artificial Sequence: Synthetic oligonucleotide
ctgtcagatagattcagact

SEQ ID NO: 8469 - DNA, 20 bp, Artificial Sequence
  Description of Artificial Sequence: Synthetic oligonucleotide
tgtcagatagattcagactt

SEQ ID NO: 8470 - DNA, 20 bp, Artificial Sequence
  Description of Artificial Sequence: Synthetic oligonucleotide
gtcagatagattcagacttc

SEQ ID NO: 8471 - DNA, 20 bp, Artificial Sequence
  Description of Artificial Sequence: Synthetic oligonucleotide
tcagatagattcagacttct

SEQ ID NO: 8472 - DNA, 20 bp, Artificial Sequence
  Description of Artificial Sequence: Synthetic oligonucleotide
cagatagattcagacttctt

SEQ ID NO: 8473 - DNA, 20 bp, Artificial Sequence
  Description of Artificial Sequence: Synthetic oligonucleotide
agatagattcagacttctta

SEQ ID NO: 8474 - DNA, 20 bp, Artificial Sequence
  Description of Artificial Sequence: Synthetic oligonucleotide
gatagattcagacttcttag

SEQ ID NO: 8475 - DNA, 20 bp, Artificial Sequence
  Description of Artificial Sequence: Synthetic oligonucleotide
atagattcagacttcttaga

SEQ ID NO: 8476 - DNA, 20 bp, Artificial Sequence
  Description of Artificial Sequence: Synthetic oligonucleotide
tagattcagacttcttagac

SEQ ID NO: 8477 - DNA, 20 bp, Artificial Sequence
  Description of Artificial Sequence: Synthetic oligonucleotide
agattcagacttcttagaca

SEQ ID NO: 8478 - DNA, 20 bp, Artificial Sequence
  Description of Artificial Sequence: Synthetic oligonucleotide
gattcagacttcttagacag

SEQ ID NO: 8479 - DNA, 20 bp, Artificial Sequence
  Description of Artificial Sequence: Synthetic oligonucleotide
attcagacttcttagacagc

SEQ ID NO: 8480 - DNA, 20 bp, Artificial Sequence
  Description of Artificial Sequence: Synthetic oligonucleotide
ttcagacttcttagacagcc

SEQ ID NO: 8481 - DNA, 20 bp, Artificial Sequence
  Description of Artificial Sequence: Synthetic oligonucleotide
tcagacttcttagacagccg

SEQ ID NO: 8482 - DNA, 20 bp, Artificial Sequence
  Description of Artificial Sequence: Synthetic oligonucleotide
cagacttcttagacagccgc

SEQ ID NO: 8483 - DNA, 20 bp, Artificial Sequence
  Description of Artificial Sequence: Synthetic oligonucleotide
agacttcttagacagccgcc

SEQ ID NO: 8484 - DNA, 20 bp, Artificial Sequence
  Description of Artificial Sequence: Synthetic oligonucleotide
gacttcttagacagccgcca

SEQ ID NO: 8485 - DNA, 20 bp, Artificial Sequence
  Description of Artificial Sequence: Synthetic oligonucleotide
acttcttagacagccgccac

SEQ ID NO: 8486 - DNA, 20 bp, Artificial Sequence
  Description of Artificial Sequence: Synthetic oligonucleotide
cttcttagacagccgccact

SEQ ID NO: 8487 - DNA, 20 bp, Artificial Sequence
  Description of Artificial Sequence: Synthetic oligonucleotide
ttcttagacagccgccacta

SEQ ID NO: 8488 - DNA, 20 bp, Artificial Sequence
  Description of Artificial Sequence: Synthetic oligonucleotide
tcttagacagccgccactat

SEQ ID NO: 8489 - DNA, 20 bp, Artificial Sequence
  Description of Artificial Sequence: Synthetic oligonucleotide
cttagacagccgccactata

SEQ ID NO: 8490 - DNA, 20 bp, Artificial Sequence
  Description of Artificial Sequence: Synthetic oligonucleotide
ttagacagccgccactataa

SEQ ID NO: 8491 - DNA, 20 bp, Artificial Sequence
  Description of Artificial Sequence: Synthetic oligonucleotide
tagacagccgccactataac

SEQ ID NO: 8492 - DNA, 20 bp, Artificial Sequence
  Description of Artificial Sequence: Synthetic oligonucleotide
agacagccgccactataaca

SEQ ID NO: 8493 - DNA, 20 bp, Artificial Sequence
  Description of Artificial Sequence: Synthetic oligonucleotide
gacagccgccactataacaa

SEQ ID NO: 8494 - DNA, 20 bp, Artificial Sequence
  Description of Artificial Sequence: Synthetic oligonucleotide
acagccgccactataacaaa

SEQ ID NO: 8495 - DNA, 20 bp, Artificial Sequence
  Description of Artificial Sequence: Synthetic oligonucleotide
cagccgccactataacaaat

SEQ ID NO: 8496 - DNA, 20 bp, Artificial Sequence
  Description of Artificial Sequence: Synthetic oligonucleotide
agccgccactataacaaatc

SEQ ID NO: 8497 - DNA, 20 bp, Artificial Sequence
  Description of Artificial Sequence: Synthetic oligonucleotide
gccgccactataacaaatca

SEQ ID NO: 8498 - DNA, 20 bp, Artificial Sequence
  Description of Artificial Sequence: Synthetic oligonucleotide
ccgccactataacaaatcag

SEQ ID NO: 8499 - DNA, 20 bp, Artificial Sequence
  Description of Artificial Sequence: Synthetic oligonucleotide
cgccactataacaaatcagt

SEQ ID NO: 8500 - DNA, 20 bp, Artificial Sequence
  Description of Artificial Sequence: Synthetic oligonucleotide
gccactataacaaatcagtc

SEQ ID NO: 8501 - DNA, 20 bp, Artificial Sequence
  Description of Artificial Sequence: Synthetic oligonucleotide
ccactataacaaatcagtcg

SEQ ID NO: 8502 - DNA, 20 bp, Artificial Sequence
  Description of Artificial Sequence: Synthetic oligonucleotide
cactataacaaatcagtcgt

SEQ ID NO: 8503 - DNA, 20 bp, Artificial Sequence
  Description of Artificial Sequence: Synthetic oligonucleotide
actataacaaatcagtcgtg

SEQ ID NO: 8504 - DNA, 20 bp, Artificial Sequence
  Description of Artificial Sequence: Synthetic oligonucleotide
ctataacaaatcagtcgtga

SEQ ID NO: 8505 - DNA, 20 bp, Artificial Sequence
  Description of Artificial Sequence: Synthetic oligonucleotide
tataacaaatcagtcgtgaa

SEQ ID NO: 8506 - DNA, 20 bp, Artificial Sequence
  Description of Artificial Sequence: Synthetic oligonucleotide
ataacaaatcagtcgtgaat

SEQ ID NO: 8507 - DNA, 20 bp, Artificial Sequence
  Description of Artificial Sequence: Synthetic oligonucleotide
taacaaatcagtcgtgaata

SEQ ID NO: 8508 - DNA, 20 bp, Artificial Sequence
  Description of Artificial Sequence: Synthetic oligonucleotide
aacaaatcagtcgtgaatat

SEQ ID NO: 8509 - DNA, 20 bp, Artificial Sequence
  Description of Artificial Sequence: Synthetic oligonucleotide
acaaatcagtcgtgaatatc

SEQ ID NO: 8510 - DNA, 20 bp, Artificial Sequence
  Description of Artificial Sequence: Synthetic oligonucleotide
caaatcagtcgtgaatatct

SEQ ID NO: 8511 - DNA, 20 bp, Artificial Sequence
  Description of Artificial Sequence: Synthetic oligonucleotide
aaatcagtcgtgaatatctc

SEQ ID NO: 8512 - DNA, 20 bp, Artificial Sequence
  Description of Artificial Sequence: Synthetic oligonucleotide
aatcagtcgtgaatatctca

SEQ ID NO: 8513 - DNA, 20 bp, Artificial Sequence
  Description of Artificial Sequence: Synthetic oligonucleotide
atcagtcgtgaatatctcat

SEQ ID NO: 8514 - DNA, 20 bp, Artificial Sequence
  Description of Artificial Sequence: Synthetic oligonucleotide
tcagtcgtgaatatctcata

SEQ ID NO: 8515 - DNA, 20 bp, Artificial Sequence
  Description of Artificial Sequence: Synthetic oligonucleotide
cagtcgtgaatatctcatag

SEQ ID NO: 8516 - DNA, 20 bp, Artificial Sequence
  Description of Artificial Sequence: Synthetic oligonucleotide
agtcgtgaatatctcataga

SEQ ID NO: 8517 - DNA, 20 bp, Artificial Sequence
  Description of Artificial Sequence: Synthetic oligonucleotide
gtcgtgaatatctcatagag

SEQ ID NO: 8518 - DNA, 20 bp, Artificial Sequence
  Description of Artificial Sequence: Synthetic oligonucleotide
tcgtgaatatctcatagagt

SEQ ID NO: 8519 - DNA, 20 bp, Artificial Sequence
  Description of Artificial Sequence: Synthetic oligonucleotide
cgtgaatatctcatagagtc

SEQ ID NO: 8520 - DNA, 20 bp, Artificial Sequence
  Description of Artificial Sequence: Synthetic oligonucleotide
gtgaatatctcatagagtct

SEQ ID NO: 8521 - DNA, 20 bp, Artificial Sequence
  Description of Artificial Sequence: Synthetic oligonucleotide
tgaatatctcatagagtctg

SEQ ID NO: 8522 - DNA, 20 bp, Artificial Sequence
  Description of Artificial Sequence: Synthetic oligonucleotide
gaatatctcatagagtctgg

SEQ ID NO: 8523 - DNA, 20 bp, Artificial Sequence
  Description of Artificial Sequence: Synthetic oligonucleotide
aatatctcatagagtctggt

SEQ ID NO: 8524 - DNA, 20 bp, Artificial Sequence
  Description of Artificial Sequence: Synthetic oligonucleotide
atatctcatagagtctggtt

SEQ ID NO: 8525 - DNA, 20 bp, Artificial Sequence
  Description of Artificial Sequence: Synthetic oligonucleotide
tatctcatagagtctggttt

SEQ ID NO: 8526 - DNA, 20 bp, Artificial Sequence
  Description of Artificial Sequence: Synthetic oligonucleotide
atctcatagagtctggtttt

SEQ ID NO: 8527 - DNA, 20 bp, Artificial Sequence
  Description of Artificial Sequence: Synthetic oligonucleotide
tctcatagagtctggttttg

SEQ ID NO: 8528 - DNA, 20 bp, Artificial Sequence
  Description of Artificial Sequence: Synthetic oligonucleotide
ctcatagagtctggttttgt

SEQ ID NO: 8529 - DNA, 20 bp, Artificial Sequence
  Description of Artificial Sequence: Synthetic oligonucleotide
tcatagagtctggttttgtt

SEQ ID NO: 8530 - DNA, 20 bp, Artificial Sequence
  Description of Artificial Sequence: Synthetic oligonucleotide
catagagtctggttttgttg

SEQ ID NO: 8531 - DNA, 20 bp, Artificial Sequence
  Description of Artificial Sequence: Synthetic oligonucleotide
atagagtctggttttgttga

SEQ ID NO: 8532 - DNA, 20 bp, Artificial Sequence
  Description of Artificial Sequence: Synthetic oligonucleotide
tagagtctggttttgttgat

SEQ ID NO: 8533 - DNA, 20 bp, Artificial Sequence
  Description of Artificial Sequence: Synthetic oligonucleotide
agagtctggttttgttgatg

SEQ ID NO: 8534 - DNA, 20 bp, Artificial Sequence
  Description of Artificial Sequence: Synthetic oligonucleotide
gagtctggttttgttgatgt

SEQ ID NO: 8535 - DNA, 20 bp, Artificial Sequence
  Description of Artificial Sequence: Synthetic oligonucleotide
agtctggttttgttgatgtt

SEQ ID NO: 8536 - DNA, 20 bp, Artificial Sequence
  Description of Artificial Sequence: Synthetic oligonucleotide
gtctggttttgttgatgttt

SEQ ID NO: 8537 - DNA, 20 bp, Artificial Sequence
  Description of Artificial Sequence: Synthetic oligonucleotide
tctggttttgttgatgtttc

SEQ ID NO: 8538 - DNA, 20 bp, Artificial Sequence
  Description of Artificial Sequence: Synthetic oligonucleotide
ctggttttgttgatgtttcc

SEQ ID NO: 8539 - DNA, 20 bp, Artificial Sequence
  Description of Artificial Sequence: Synthetic oligonucleotide
tggttttgttgatgtttcct

SEQ ID NO: 8540 - DNA, 20 bp, Artificial Sequence
  Description of Artificial Sequence: Synthetic oligonucleotide
ggttttgttgatgtttcctg

SEQ ID NO: 8541 - DNA, 20 bp, Artificial Sequence
  Description of Artificial Sequence: Synthetic oligonucleotide
gttttgttgatgtttcctgg

SEQ ID NO: 8542 - DNA, 20 bp, Artificial Sequence
  Description of Artificial Sequence: Synthetic oligonucleotide
ttttgttgatgtttcctggt

SEQ ID NO: 8543 - DNA, 20 bp, Artificial Sequence
  Description of Artificial Sequence: Synthetic oligonucleotide
tttgttgatgtttcctggtt

SEQ ID NO: 8544 - DNA, 20 bp, Artificial Sequence
  Description of Artificial Sequence: Synthetic oligonucleotide
ttgttgatgtttcctggttg

SEQ ID NO: 8545 - DNA, 20 bp, Artificial Sequence
  Description of Artificial Sequence: Synthetic oligonucleotide
tgttgatgtttcctggttgg

SEQ ID NO: 8546 - DNA, 20 bp, Artificial Sequence
  Description of Artificial Sequence: Synthetic oligonucleotide
gttgatgtttcctggttggt

SEQ ID NO: 8547 - DNA, 20 bp, Artificial Sequence
  Description of Artificial Sequence: Synthetic oligonucleotide
ttgatgtttcctggttggtt

SEQ ID NO: 8548 - DNA, 20 bp, Artificial Sequence
  Description of Artificial Sequence: Synthetic oligonucleotide
tgatgtttcctggttggttg

SEQ ID NO: 8549 - DNA, 20 bp, Artificial Sequence
  Description of Artificial Sequence: Synthetic oligonucleotide
gatgtttcctggttggttgt

SEQ ID NO: 8550 - DNA, 20 bp, Artificial Sequence
  Description of Artificial Sequence: Synthetic oligonucleotide
atgtttcctggttggttgtt

SEQ ID NO: 8551 - DNA, 20 bp, Artificial Sequence
  Description of Artificial Sequence: Synthetic oligonucleotide
tgtttcctggttggttgttt

SEQ ID NO: 8552 - DNA, 20 bp, Artificial Sequence
  Description of Artificial Sequence: Synthetic oligonucleotide
gtttcctggttggttgtttt

SEQ ID NO: 8553 - DNA, 20 bp, Artificial Sequence
  Description of Artificial Sequence: Synthetic oligonucleotide
tttcctggttggttgttttt

SEQ ID NO: 8554 - DNA, 20 bp, Artificial Sequence
  Description of Artificial Sequence: Synthetic oligonucleotide
ttcctggttggttgtttttg

SEQ ID NO: 8555 - DNA, 20 bp, Artificial Sequence
  Description of Artificial Sequence: Synthetic oligonucleotide
tcctggttggttgtttttgt

SEQ ID NO: 8556 - DNA, 20 bp, Artificial Sequence
  Description of Artificial Sequence: Synthetic oligonucleotide
cctggttggttgtttttgtt

SEQ ID NO: 8557 - DNA, 20 bp, Artificial Sequence
  Description of Artificial Sequence: Synthetic oligonucleotide
ctggttggttgtttttgttg

SEQ ID NO: 8558 - DNA, 20 bp, Artificial Sequence
  Description of Artificial Sequence: Synthetic oligonucleotide
tggttggttgtttttgttgt

SEQ ID NO: 8559 - DNA, 20 bp, Artificial Sequence
  Description of Artificial Sequence: Synthetic oligonucleotide
ggttggttgtttttgttgtt

SEQ ID NO: 8560 - DNA, 20 bp, Artificial Sequence
  Description of Artificial Sequence: Synthetic oligonucleotide
gttggttgtttttgttgttg

SEQ ID NO: 8561 - DNA, 20 bp, Artificial Sequence
  Description of Artificial Sequence: Synthetic oligonucleotide
ttggttgtttttgttgttgt

SEQ ID NO: 8562 - DNA, 20 bp, Artificial Sequence
  Description of Artificial Sequence: Synthetic oligonucleotide
tggttgtttttgttgttgtt

SEQ ID NO: 8563 - DNA, 20 bp, Artificial Sequence
  Description of Artificial Sequence: Synthetic oligonucleotide
ggttgtttttgttgttgttc

SEQ ID NO: 8564 - DNA, 20 bp, Artificial Sequence
  Description of Artificial Sequence: Synthetic oligonucleotide
gttgtttttgttgttgttca

SEQ ID NO: 8565 - DNA, 20 bp, Artificial Sequence
  Description of Artificial Sequence: Synthetic oligonucleotide
ttgtttttgttgttgttcag

SEQ ID NO: 8566 - DNA, 20 bp, Artificial Sequence
  Description of Artificial Sequence: Synthetic oligonucleotide
tgtttttgttgttgttcaga

SEQ ID NO: 8567 - DNA, 20 bp, Artificial Sequence
  Description of Artificial Sequence: Synthetic oligonucleotide
gtttttgttgttgttcagag

SEQ ID NO: 8568 - DNA, 20 bp, Artificial Sequence
  Description of Artificial Sequence: Synthetic oligonucleotide
tttttgttgttgttcagaga

SEQ ID NO: 8569 - DNA, 20 bp, Artificial Sequence
  Description of Artificial Sequence: Synthetic oligonucleotide
ttttgttgttgttcagagat

SEQ ID NO: 8570 - DNA, 20 bp, Artificial Sequence
  Description of Artificial Sequence: Synthetic oligonucleotide
tttgttgttgttcagagatg

SEQ ID NO: 8571 - DNA, 20 bp, Artificial Sequence
  Description of Artificial Sequence: Synthetic oligonucleotide
ttgttgttgttcagagatgg

SEQ ID NO: 8572 - DNA, 20 bp, Artificial Sequence
  Description of Artificial Sequence: Synthetic oligonucleotide
tgttgttgttcagagatggt

SEQ ID NO: 8573 - DNA, 20 bp, Artificial Sequence
  Description of Artificial Sequence: Synthetic oligonucleotide
gttgttgttcagagatggtg

SEQ ID NO: 8574 - DNA, 20 bp, Artificial Sequence
  Description of Artificial Sequence: Synthetic oligonucleotide
ttgttgttcagagatggtgg

SEQ ID NO: 8575 - DNA, 20 bp, Artificial Sequence
  Description of Artificial Sequence: Synthetic oligonucleotide
tgttgttcagagatggtggc

SEQ ID NO: 8576 - DNA, 20 bp, Artificial Sequence
  Description of Artificial Sequence: Synthetic oligonucleotide
gttgttcagagatggtggct

SEQ ID NO: 8577 - DNA, 20 bp, Artificial Sequence
  Description of Artificial Sequence: Synthetic oligonucleotide
ttgttcagagatggtggcta

SEQ ID NO: 8578 - DNA, 20 bp, Artificial Sequence
  Description of Artificial Sequence: Synthetic oligonucleotide
tgttcagagatggtggctac

SEQ ID NO: 8579 - DNA, 20 bp, Artificial Sequence
  Description of Artificial Sequence: Synthetic oligonucleotide
gttcagagatggtggctact

SEQ ID NO: 8580 - DNA, 20 bp, Artificial Sequence
  Description of Artificial Sequence: Synthetic oligonucleotide
ttcagagatggtggctactg

SEQ ID NO: 8581 - DNA, 20 bp, Artificial Sequence
  Description of Artificial Sequence: Synthetic oligonucleotide
tcagagatggtggctactgc

SEQ ID NO: 8582 - DNA, 20 bp, Artificial Sequence
  Description of Artificial Sequence: Synthetic oligonucleotide
cagagatggtggctactgcc

SEQ ID NO: 8583 - DNA, 20 bp, Artificial Sequence
  Description of Artificial Sequence: Synthetic oligonucleotide
agagatggtggctactgcca

SEQ ID NO: 8584 - DNA, 20 bp, Artificial Sequence
  Description of Artificial Sequence: Synthetic oligonucleotide
gagatggtggctactgccac

SEQ ID NO: 8585 - DNA, 20 bp, Artificial Sequence
  Description of Artificial Sequence: Synthetic oligonucleotide
agatggtggctactgccacc

SEQ ID NO: 8586 - DNA, 20 bp, Artificial Sequence
  Description of Artificial Sequence: Synthetic oligonucleotide
gatggtggctactgccacct

SEQ ID NO: 8587 - DNA, 20 bp, Artificial Sequence
  Description of Artificial Sequence: Synthetic oligonucleotide
atggtggctactgccacctg

SEQ ID NO: 8588 - DNA, 20 bp, Artificial Sequence
  Description of Artificial Sequence: Synthetic oligonucleotide
tggtggctactgccacctga

SEQ ID NO: 8589 - DNA, 20 bp, Artificial Sequence
  Description of Artificial Sequence: Synthetic oligonucleotide
ggtggctactgccacctgag

SEQ ID NO: 8590 - DNA, 20 bp, Artificial Sequence
  Description of Artificial Sequence: Synthetic oligonucleotide
gtggctactgccacctgaga

SEQ ID NO: 8591 - DNA, 20 bp, Artificial Sequence
  Description of Artificial Sequence: Synthetic oligonucleotide
tggctactgccacctgagac

SEQ ID NO: 8592 - DNA, 20 bp, Artificial Sequence
  Description of Artificial Sequence: Synthetic oligonucleotide
ggctactgccacctgagacc

SEQ ID NO: 8593 - DNA, 20 bp, Artificial Sequence
  Description of Artificial Sequence: Synthetic oligonucleotide
gctactgccacctgagacca

SEQ ID NO: 8594 - DNA, 20 bp, Artificial Sequence
  Description of Artificial Sequence: Synthetic oligonucleotide
ctactgccacctgagaccat

SEQ ID NO: 8595 - DNA, 20 bp, Artificial Sequence
  Description of Artificial Sequence: Synthetic oligonucleotide
tactgccacctgagaccata

SEQ ID NO: 8596 - DNA, 20 bp, Artificial Sequence
  Description of Artificial Sequence: Synthetic oligonucleotide
actgccacctgagaccataa

SEQ ID NO: 8597 - DNA, 20 bp, Artificial Sequence
  Description of Artificial Sequence: Synthetic oligonucleotide
ctgccacctgagaccataat

SEQ ID NO: 8598 - DNA, 20 bp, Artificial Sequence
  Description of Artificial Sequence: Synthetic oligonucleotide
tgccacctgagaccataatt

SEQ ID NO: 8599 - DNA, 20 bp, Artificial Sequence
  Description of Artificial Sequence: Synthetic oligonucleotide
gccacctgagaccataatta

SEQ ID NO: 8600 - DNA, 20 bp, Artificial Sequence
  Description of Artificial Sequence: Synthetic oligonucleotide
ccacctgagaccataattaa

SEQ ID NO: 8601 - DNA, 20 bp, Artificial Sequence
  Description of Artificial Sequence: Synthetic oligonucleotide
cacctgagaccataattaag

SEQ ID NO: 8602 - DNA, 20 bp, Artificial Sequence
  Description of Artificial Sequence: Synthetic oligonucleotide
acctgagaccataattaagg

SEQ ID NO: 8603 - DNA, 20 bp, Artificial Sequence
  Description of Artificial Sequence: Synthetic oligonucleotide
cctgagaccataattaaggg

SEQ ID NO: 8604 - DNA, 20 bp, Artificial Sequence
  Description of Artificial Sequence: Synthetic oligonucleotide
ctgagaccataattaaggga

SEQ ID NO: 8605 - DNA, 20 bp, Artificial Sequence
  Description of Artificial Sequence: Synthetic oligonucleotide
tgagaccataattaagggag

SEQ ID NO: 8606 - DNA, 20 bp, Artificial Sequence
  Description of Artificial Sequence: Synthetic oligonucleotide
gagaccataattaagggaga

SEQ ID NO: 8607 - DNA, 20 bp, Artificial Sequence
  Description of Artificial Sequence: Synthetic oligonucleotide
agaccataattaagggagat

SEQ ID NO: 8608 - DNA, 20 bp, Artificial Sequence
  Description of Artificial Sequence: Synthetic oligonucleotide
gaccataattaagggagata

SEQ ID NO: 8609 - DNA, 20 bp, Artificial Sequence
  Description of Artificial Sequence: Synthetic oligonucleotide
accataattaagggagatag

SEQ ID NO: 8610 - DNA, 20 bp, Artificial Sequence
  Description of Artificial Sequence: Synthetic oligonucleotide
ccataattaagggagataga

SEQ ID NO: 8611 - DNA, 20 bp, Artificial Sequence
  Description of Artificial Sequence: Synthetic oligonucleotide
cataattaagggagatagat

SEQ ID NO: 8612 - DNA, 20 bp, Artificial Sequence
  Description of Artificial Sequence: Synthetic oligonucleotide
ataattaagggagatagatt

SEQ ID NO: 8613 - DNA, 20 bp, Artificial Sequence
  Description of Artificial Sequence: Synthetic oligonucleotide
taattaagggagatagattt

SEQ ID NO: 8614 - DNA, 20 bp, Artificial Sequence
  Description of Artificial Sequence: Synthetic oligonucleotide
aattaagggagatagatttt

SEQ ID NO: 8615 - DNA, 20 bp, Artificial Sequence
  Description of Artificial Sequence: Synthetic oligonucleotide
attaagggagatagatttta

SEQ ID NO: 8616 - DNA, 20 bp, Artificial Sequence
  Description of Artificial Sequence: Synthetic oligonucleotide
ttaagggagatagattttat

SEQ ID NO: 8617 - DNA, 20 bp, Artificial Sequence
  Description of Artificial Sequence: Synthetic oligonucleotide
taagggagatagattttatt

SEQ ID NO: 8618 - DNA, 20 bp, Artificial Sequence
  Description of Artificial Sequence: Synthetic oligonucleotide
aagggagatagattttatta

SEQ ID NO: 8619 - DNA, 20 bp, Artificial Sequence
  Description of Artificial Sequence: Synthetic oligonucleotide
agggagatagattttattat

SEQ ID NO: 8620 - DNA, 20 bp, Artificial Sequence
  Description of Artificial Sequence: Synthetic oligonucleotide
gggagatagattttattatc

SEQ ID NO: 8621 - DNA, 20 bp, Artificial Sequence
  Description of Artificial Sequence: Synthetic oligonucleotide
ggagatagattttattatca

SEQ ID NO: 8622 - DNA, 20 bp, Artificial Sequence
  Description of Artificial Sequence: Synthetic oligonucleotide
gagatagattttattatcac

SEQ ID NO: 8623 - DNA, 20 bp, Artificial Sequence
  Description of Artificial Sequence: Synthetic oligonucleotide
agatagattttattatcaca

SEQ ID NO: 8624 - DNA, 20 bp, Artificial Sequence
  Description of Artificial Sequence: Synthetic oligonucleotide
gatagattttattatcacat

SEQ ID NO: 8625 - DNA, 20 bp, Artificial Sequence
  Description of Artificial Sequence: Synthetic oligonucleotide
atagattttattatcacata

SEQ ID NO: 8626 - DNA, 20 bp, Artificial Sequence
  Description of Artificial Sequence: Synthetic oligonucleotide
tagattttattatcacatat

SEQ ID NO: 8627 - DNA, 20 bp, Artificial Sequence
  Description of Artificial Sequence: Synthetic oligonucleotide
agattttattatcacatatt

SEQ ID NO: 8628 - DNA, 20 bp, Artificial Sequence
  Description of Artificial Sequence: Synthetic oligonucleotide
gattttattatcacatattt

SEQ ID NO: 8629 - DNA, 20 bp, Artificial Sequence
  Description of Artificial Sequence: Synthetic oligonucleotide
attttattatcacatatttt

SEQ ID NO: 8630 - DNA, 20 bp, Artificial Sequence
  Description of Artificial Sequence: Synthetic oligonucleotide
ttttattatcacatattttc

SEQ ID NO: 8631 - DNA, 20 bp, Artificial Sequence
  Description of Artificial Sequence: Synthetic oligonucleotide
tttattatcacatattttcc

SEQ ID NO: 8632 - DNA, 20 bp, Artificial Sequence
  Description of Artificial Sequence: Synthetic oligonucleotide
ttattatcacatattttccc

SEQ ID NO: 8633 - DNA, 20 bp, Artificial Sequence
  Description of Artificial Sequence: Synthetic oligonucleotide
tattatcacatattttcccc

SEQ ID NO: 8634 - DNA, 20 bp, Artificial Sequence
  Description of Artificial Sequence: Synthetic oligonucleotide
attatcacatattttcccct

SEQ ID NO: 8635 - DNA, 20 bp, Artificial Sequence
  Description of Artificial Sequence: Synthetic oligonucleotide
ttatcacatattttcccctt

SEQ ID NO: 8636 - DNA, 20 bp, Artificial Sequence
  Description of Artificial Sequence: Synthetic oligonucleotide
tatcacatattttccccttc

SEQ ID NO: 8637 - DNA, 20 bp, Artificial Sequence
  Description of Artificial Sequence: Synthetic oligonucleotide
atcacatattttccccttcc

SEQ ID NO: 8638 - DNA, 20 bp, Artificial Sequence
  Description of Artificial Sequence: Synthetic oligonucleotide
tcacatattttccccttcca

SEQ ID NO: 8639 - DNA, 20 bp, Artificial Sequence
  Description of Artificial Sequence: Synthetic oligonucleotide
cacatattttccccttccat

SEQ ID NO: 8640 - DNA, 20 bp, Artificial Sequence
  Description of Artificial Sequence: Synthetic oligonucleotide
acatattttccccttccatc

SEQ ID NO: 8641 - DNA, 20 bp, Artificial Sequence
  Description of Artificial Sequence: Synthetic oligonucleotide
catattttccccttccatcc

SEQ ID NO: 8642 - DNA, 20 bp, Artificial Sequence
  Description of Artificial Sequence: Synthetic oligonucleotide
atattttccccttccatcca

SEQ ID NO: 8643 - DNA, 20 bp, Artificial Sequence
  Description of Artificial Sequence: Synthetic oligonucleotide
tattttccccttccatccag

SEQ ID NO: 8644 - DNA, 20 bp, Artificial Sequence
  Description of Artificial Sequence: Synthetic oligonucleotide
attttccccttccatccagc

SEQ ID NO: 8645 - DNA, 20 bp, Artificial Sequence
  Description of Artificial Sequence: Synthetic oligonucleotide
ttttccccttccatccagct

SEQ ID NO: 8646 - DNA, 20 bp, Artificial Sequence
  Description of Artificial Sequence: Synthetic oligonucleotide
tttccccttccatccagcta

SEQ ID NO: 8647 - DNA, 20 bp, Artificial Sequence
  Description of Artificial Sequence: Synthetic oligonucleotide
ttccccttccatccagctag

SEQ ID NO: 8648 - DNA, 20 bp, Artificial Sequence
  Description of Artificial Sequence: Synthetic oligonucleotide
tccccttccatccagctagc

SEQ ID NO: 8649 - DNA, 20 bp, Artificial Sequence
  Description of Artificial Sequence: Synthetic oligonucleotide
ccccttccatccagctagca

SEQ ID NO: 8650 - DNA, 20 bp, Artificial Sequence
  Description of Artificial Sequence: Synthetic oligonucleotide
cccttccatccagctagcac

SEQ ID NO: 8651 - DNA, 20 bp, Artificial Sequence
  Description of Artificial Sequence: Synthetic oligonucleotide
ccttccatccagctagcacc

SEQ ID NO: 8652 - DNA, 20 bp, Artificial Sequence
  Description of Artificial Sequence: Synthetic oligonucleotide
cttccatccagctagcacct

SEQ ID NO: 8653 - DNA, 20 bp, Artificial Sequence
  Description of Artificial Sequence: Synthetic oligonucleotide
ttccatccagctagcacctc

SEQ ID NO: 8654 - DNA, 20 bp, Artificial Sequence
  Description of Artificial Sequence: Synthetic oligonucleotide
tccatccagctagcacctca

SEQ ID NO: 8655 - DNA, 20 bp, Artificial Sequence
  Description of Artificial Sequence: Synthetic oligonucleotide
ccatccagctagcacctcaa

SEQ ID NO: 8656 - DNA, 20 bp, Artificial Sequence
  Description of Artificial Sequence: Synthetic oligonucleotide
catccagctagcacctcaaa

SEQ ID NO: 8657 - DNA, 20 bp, Artificial Sequence
  Description of Artificial Sequence: Synthetic oligonucleotide
atccagctagcacctcaaaa

SEQ ID NO: 8658 - DNA, 20 bp, Artificial Sequence
  Description of Artificial Sequence: Synthetic oligonucleotide
tccagctagcacctcaaaac

SEQ ID NO: 8659 - DNA, 20 bp, Artificial Sequence
  Description of Artificial Sequence: Synthetic oligonucleotide
ccagctagcacctcaaaaca

SEQ ID NO: 8660 - DNA, 20 bp, Artificial Sequence
  Description of Artificial Sequence: Synthetic oligonucleotide
cagctagcacctcaaaacac

SEQ ID NO: 8661 - DNA, 20 bp, Artificial Sequence
  Description of Artificial Sequence: Synthetic oligonucleotide
agctagcacctcaaaacact

SEQ ID NO: 8662 - DNA, 20 bp, Artificial Sequence
  Description of Artificial Sequence: Synthetic oligonucleotide
gctagcacctcaaaacactc

SEQ ID NO: 8663 - DNA, 20 bp, Artificial Sequence
  Description of Artificial Sequence: Synthetic oligonucleotide
ctagcacctcaaaacactca

SEQ ID NO: 8664 - DNA, 20 bp, Artificial Sequence
  Description of Artificial Sequence: Synthetic oligonucleotide
tagcacctcaaaacactcag

SEQ ID NO: 8665 - DNA, 20 bp, Artificial Sequence
  Description of Artificial Sequence: Synthetic oligonucleotide
agcacctcaaaacactcaga

SEQ ID NO: 8666 - DNA, 20 bp, Artificial Sequence
  Description of Artificial Sequence: Synthetic oligonucleotide
gcacctcaaaacactcagaa

SEQ ID NO: 8667 - DNA, 20 bp, Artificial Sequence
  Description of Artificial Sequence: Synthetic oligonucleotide
cacctcaaaacactcagaag

SEQ ID NO: 8668 - DNA, 20 bp, Artificial Sequence
  Description of Artificial Sequence: Synthetic oligonucleotide
acctcaaaacactcagaaga

SEQ ID NO: 8669 - DNA, 20 bp, Artificial Sequence
  Description of Artificial Sequence: Synthetic oligonucleotide
cctcaaaacactcagaagaa

SEQ ID NO: 8670 - DNA, 20 bp, Artificial Sequence
  Description of Artificial Sequence: Synthetic oligonucleotide
ctcaaaacactcagaagaac

SEQ ID NO: 8671 - DNA, 20 bp, Artificial Sequence
  Description of Artificial Sequence: Synthetic oligonucleotide
tcaaaacactcagaagaacc

SEQ ID NO: 8672 - DNA, 20 bp, Artificial Sequence
  Description of Artificial Sequence: Synthetic oligonucleotide
caaaacactcagaagaacct

SEQ ID NO: 8673 - DNA, 20 bp, Artificial Sequence
  Description of Artificial Sequence: Synthetic oligonucleotide
aaaacactcagaagaacctt

SEQ ID NO: 8674 - DNA, 20 bp, Artificial Sequence
  Description of Artificial Sequence: Synthetic oligonucleotide
aaacactcagaagaaccttt

SEQ ID NO: 8675 - DNA, 20 bp, Artificial Sequence
  Description of Artificial Sequence: Synthetic oligonucleotide
aacactcagaagaacctttg

SEQ ID NO: 8676 - DNA, 20 bp, Artificial Sequence
  Description of Artificial Sequence: Synthetic oligonucleotide
acactcagaagaacctttga

SEQ ID NO: 8677 - DNA, 20 bp, Artificial Sequence
  Description of Artificial Sequence: Synthetic oligonucleotide
cactcagaagaacctttgag

SEQ ID NO: 8678 - DNA, 20 bp, Artificial Sequence
  Description of Artificial Sequence: Synthetic oligonucleotide
actcagaagaacctttgagg

SEQ ID NO: 8679 - DNA, 20 bp, Artificial Sequence
  Description of Artificial Sequence: Synthetic oligonucleotide
ctcagaagaacctttgaggc

SEQ ID NO: 8680 - DNA, 20 bp, Artificial Sequence
  Description of Artificial Sequence: Synthetic oligonucleotide
tcagaagaacctttgaggcc

SEQ ID NO: 8681 - DNA, 20 bp, Artificial Sequence
  Description of Artificial Sequence: Synthetic oligonucleotide
cagaagaacctttgaggcct

SEQ ID NO: 8682 - DNA, 20 bp, Artificial Sequence
  Description of Artificial Sequence: Synthetic oligonucleotide
agaagaacctttgaggcctt

SEQ ID NO: 8683 - DNA, 20 bp, Artificial Sequence
  Description of Artificial Sequence: Synthetic oligonucleotide
gaagaacctttgaggccttc

SEQ ID NO: 8684 - DNA, 20 bp, Artificial Sequence
  Description of Artificial Sequence: Synthetic oligonucleotide
aagaacctttgaggccttcc

SEQ ID NO: 8685 - DNA, 20 bp, Artificial Sequence
  Description of Artificial Sequence: Synthetic oligonucleotide
agaacctttgaggccttcct

SEQ ID NO: 8686 - DNA, 20 bp, Artificial Sequence
  Description of Artificial Sequence: Synthetic oligonucleotide
gaacctttgaggccttcctc

SEQ ID NO: 8687 - DNA, 20 bp, Artificial Sequence
  Description of Artificial Sequence: Synthetic oligonucleotide
aacctttgaggccttcctcc

SEQ ID NO: 8688 - DNA, 20 bp, Artificial Sequence
  Description of Artificial Sequence: Synthetic oligonucleotide
acctttgaggccttcctccc

SEQ ID NO: 8689 - DNA, 20 bp, Artificial Sequence
  Description of Artificial Sequence: Synthetic oligonucleotide
cctttgaggccttcctccca

SEQ ID NO: 8690 - DNA, 20 bp, Artificial Sequence
  Description of Artificial Sequence: Synthetic oligonucleotide
ctttgaggccttcctcccag

SEQ ID NO: 8691 - DNA, 20 bp, Artificial Sequence
  Description of Artificial Sequence: Synthetic oligonucleotide
tttgaggccttcctcccaga

SEQ ID NO: 8692 - DNA, 20 bp, Artificial Sequence
  Description of Artificial Sequence: Synthetic oligonucleotide
ttgaggccttcctcccagaa

SEQ ID NO: 8693 - DNA, 20 bp, Artificial Sequence
  Description of Artificial Sequence: Synthetic oligonucleotide
tgaggccttcctcccagaag

SEQ ID NO: 8694 - DNA, 20 bp, Artificial Sequence
  Description of Artificial Sequence: Synthetic oligonucleotide
gaggccttcctcccagaagt

SEQ ID NO: 8695 - DNA, 20 bp, Artificial Sequence
  Description of Artificial Sequence: Synthetic oligonucleotide
aggccttcctcccagaagtt

SEQ ID NO: 8696 - DNA, 20 bp, Artificial Sequence
  Description of Artificial Sequence: Synthetic oligonucleotide
ggccttcctcccagaagttt

SEQ ID NO: 8697 - DNA, 20 bp, Artificial Sequence
  Description of Artificial Sequence: Synthetic oligonucleotide
gccttcctcccagaagtttt

SEQ ID NO: 8698 - DNA, 20 bp, Artificial Sequence
  Description of Artificial Sequence: Synthetic oligonucleotide
ccttcctcccagaagttttg

SEQ ID NO: 8699 - DNA, 20 bp, Artificial Sequence
  Description of Artificial Sequence: Synthetic oligonucleotide
cttcctcccagaagttttgt

SEQ ID NO: 8700 - DNA, 20 bp, Artificial Sequence
  Description of Artificial Sequence: Synthetic oligonucleotide
ttcctcccagaagttttgtt

SEQ ID NO: 8701 - DNA, 20 bp, Artificial Sequence
  Description of Artificial Sequence: Synthetic oligonucleotide
tcctcccagaagttttgtta

SEQ ID NO: 8702 - DNA, 20 bp, Artificial Sequence
  Description of Artificial Sequence: Synthetic oligonucleotide
cctcccagaagttttgttaa

SEQ ID NO: 8703 - DNA, 20 bp, Artificial Sequence
  Description of Artificial Sequence: Synthetic oligonucleotide
ctcccagaagttttgttaaa

SEQ ID NO: 8704 - DNA, 20 bp, Artificial Sequence
  Description of Artificial Sequence: Synthetic oligonucleotide
tcccagaagttttgttaaaa

SEQ ID NO: 8705 - DNA, 20 bp, Artificial Sequence
  Description of Artificial Sequence: Synthetic oligonucleotide
cccagaagttttgttaaaac

SEQ ID NO: 8706 - DNA, 20 bp, Artificial Sequence
  Description of Artificial Sequence: Synthetic oligonucleotide
ccagaagttttgttaaaaca

SEQ ID NO: 8707 - DNA, 20 bp, Artificial Sequence
  Description of Artificial Sequence: Synthetic oligonucleotide
cagaagttttgttaaaacaa

SEQ ID NO: 8708 - DNA, 20 bp, Artificial Sequence
  Description of Artificial Sequence: Synthetic oligonucleotide
agaagttttgttaaaacaat

SEQ ID NO: 8709 - DNA, 20 bp, Artificial Sequence
  Description of Artificial Sequence: Synthetic oligonucleotide
gaagttttgttaaaacaatg

SEQ ID NO: 8710 - DNA, 20 bp, Artificial Sequence
  Description of Artificial Sequence: Synthetic oligonucleotide
aagttttgttaaaacaatga

SEQ ID NO: 8711 - DNA, 20 bp, Artificial Sequence
  Description of Artificial Sequence: Synthetic oligonucleotide
agttttgttaaaacaatgaa

SEQ ID NO: 8712 - DNA, 20 bp, Artificial Sequence
  Description of Artificial Sequence: Synthetic oligonucleotide
gttttgttaaaacaatgaaa

SEQ ID NO: 8713 - DNA, 20 bp, Artificial Sequence
  Description of Artificial Sequence: Synthetic oligonucleotide
ttttgttaaaacaatgaaat

SEQ ID NO: 8714 - DNA, 20 bp, Artificial Sequence
  Description of Artificial Sequence: Synthetic oligonucleotide
tttgttaaaacaatgaaatg

SEQ ID NO: 8715 - DNA, 20 bp, Artificial Sequence
  Description of Artificial Sequence: Synthetic oligonucleotide
ttgttaaaacaatgaaatga

SEQ ID NO: 8716 - DNA, 20 bp, Artificial Sequence
  Description of Artificial Sequence: Synthetic oligonucleotide
tgttaaaacaatgaaatgag

SEQ ID NO: 8717 - DNA, 20 bp, Artificial Sequence
  Description of Artificial Sequence: Synthetic oligonucleotide
gttaaaacaatgaaatgaga

SEQ ID NO: 8718 - DNA, 20 bp, Artificial Sequence
  Description of Artificial Sequence: Synthetic oligonucleotide
ttaaaacaatgaaatgagag

SEQ ID NO: 8719 - DNA, 20 bp, Artificial Sequence
  Description of Artificial Sequence: Synthetic oligonucleotide
taaaacaatgaaatgagagc

SEQ ID NO: 8720 - DNA, 20 bp, Artificial Sequence
  Description of Artificial Sequence: Synthetic oligonucleotide
aaaacaatgaaatgagagca

SEQ ID NO: 8721 - DNA, 20 bp, Artificial Sequence
  Description of Artificial Sequence: Synthetic oligonucleotide
aaacaatgaaatgagagcat

SEQ ID NO: 8722 - DNA, 20 bp, Artificial Sequence
  Description of Artificial Sequence: Synthetic oligonucleotide
aacaatgaaatgagagcatc

SEQ ID NO: 8723 - DNA, 20 bp, Artificial Sequence
  Description of Artificial Sequence: Synthetic oligonucleotide
acaatgaaatgagagcatca

SEQ ID NO: 8724 - DNA, 20 bp, Artificial Sequence
  Description of Artificial Sequence: Synthetic oligonucleotide
caatgaaatgagagcatcag

SEQ ID NO: 8725 - DNA, 20 bp, Artificial Sequence
  Description of Artificial Sequence: Synthetic oligonucleotide
aatgaaatgagagcatcaga

SEQ ID NO: 8726 - DNA, 20 bp, Artificial Sequence
  Description of Artificial Sequence: Synthetic oligonucleotide
atgaaatgagagcatcagac

SEQ ID NO: 8727 - DNA, 20 bp, Artificial Sequence
  Description of Artificial Sequence: Synthetic oligonucleotide
tgaaatgagagcatcagact

SEQ ID NO: 8728 - DNA, 20 bp, Artificial Sequence
  Description of Artificial Sequence: Synthetic oligonucleotide
gaaatgagagcatcagactg

SEQ ID NO: 8729 - DNA, 20 bp, Artificial Sequence
  Description of Artificial Sequence: Synthetic oligonucleotide
aaatgagagcatcagactgg

SEQ ID NO: 8730 - DNA, 20 bp, Artificial Sequence
  Description of Artificial Sequence: Synthetic oligonucleotide
aatgagagcatcagactggc

SEQ ID NO: 8731 - DNA, 20 bp, Artificial Sequence
  Description of Artificial Sequence: Synthetic oligonucleotide
atgagagcatcagactggcc

SEQ ID NO: 8732 - DNA, 20 bp, Artificial Sequence
  Description of Artificial Sequence: Synthetic oligonucleotide
tgagagcatcagactggcca

SEQ ID NO: 8733 - DNA, 20 bp, Artificial Sequence
  Description of Artificial Sequence: Synthetic oligonucleotide
gagagcatcagactggccag

SEQ ID NO: 8734 - DNA, 20 bp, Artificial Sequence
  Description of Artificial Sequence: Synthetic oligonucleotide
agagcatcagactggccagt

SEQ ID NO: 8735 - DNA, 20 bp, Artificial Sequence
  Description of Artificial Sequence: Synthetic oligonucleotide
gagcatcagactggccagtt

SEQ ID NO: 8736 - DNA, 20 bp, Artificial Sequence
  Description of Artificial Sequence: Synthetic oligonucleotide
agcatcagactggccagttt

SEQ ID NO: 8737 - DNA, 20 bp, Artificial Sequence
  Description of Artificial Sequence: Synthetic oligonucleotide
gcatcagactggccagtttt

SEQ ID NO: 8738 - DNA, 20 bp, Artificial Sequence
  Description of Artificial Sequence: Synthetic oligonucleotide
catcagactggccagttttt

SEQ ID NO: 8739 - DNA, 20 bp, Artificial Sequence
  Description of Artificial Sequence: Synthetic oligonucleotide
atcagactggccagtttttt

SEQ ID NO: 8740 - DNA, 20 bp, Artificial Sequence
  Description of Artificial Sequence: Synthetic oligonucleotide
tcagactggccagttttttt

SEQ ID NO: 8741 - DNA, 20 bp, Artificial Sequence
  Description of Artificial Sequence: Synthetic oligonucleotide
cagactggccagttttttta

SEQ ID NO: 8742 - DNA, 20 bp, Artificial Sequence
  Description of Artificial Sequence: Synthetic oligonucleotide
agactggccagtttttttac

SEQ ID NO: 8743 - DNA, 20 bp, Artificial Sequence
  Description of Artificial Sequence: Synthetic oligonucleotide
gactggccagtttttttact

SEQ ID NO: 8744 - DNA, 20 bp, Artificial Sequence
  Description of Artificial Sequence: Synthetic oligonucleotide
actggccagtttttttactc

SEQ ID NO: 8745 - DNA, 20 bp, Artificial Sequence
  Description of Artificial Sequence: Synthetic oligonucleotide
ctggccagtttttttactct

SEQ ID NO: 8746 - DNA, 20 bp, Artificial Sequence
  Description of Artificial Sequence: Synthetic oligonucleotide
tggccagtttttttactcta

SEQ ID NO: 8747 - DNA, 20 bp, Artificial Sequence
  Description of Artificial Sequence: Synthetic oligonucleotide
ggccagtttttttactctag

SEQ ID NO: 8748 - DNA, 20 bp, Artificial Sequence
  Description of Artificial Sequence: Synthetic oligonucleotide
gccagtttttttactctagg

SEQ ID NO: 8749 - DNA, 20 bp, Artificial Sequence
  Description of Artificial Sequence: Synthetic oligonucleotide
ccagtttttttactctaggg

SEQ ID NO: 8750 - DNA, 20 bp, Artificial Sequence
  Description of Artificial Sequence: Synthetic oligonucleotide
cagtttttttactctagggc

SEQ ID NO: 8751 - DNA, 20 bp, Artificial Sequence
  Description of Artificial Sequence: Synthetic oligonucleotide
agtttttttactctagggcc

SEQ ID NO: 8752 - DNA, 20 bp, Artificial Sequence
  Description of Artificial Sequence: Synthetic oligonucleotide
gtttttttactctagggcca

SEQ ID NO: 8753 - DNA, 20 bp, Artificial Sequence
  Description of Artificial Sequence: Synthetic oligonucleotide
tttttttactctagggccat

SEQ ID NO: 8754 - DNA, 20 bp, Artificial Sequence
  Description of Artificial Sequence: Synthetic oligonucleotide
ttttttactctagggccatg

SEQ ID NO: 8755 - DNA, 20 bp, Artificial Sequence
  Description of Artificial Sequence: Synthetic oligonucleotide
tttttactctagggccatgg

SEQ ID NO: 8756 - DNA, 20 bp, Artificial Sequence
  Description of Artificial Sequence: Synthetic oligonucleotide
ttttactctagggccatgga

SEQ ID NO: 8757 - DNA, 20 bp, Artificial Sequence
  Description of Artificial Sequence: Synthetic oligonucleotide
tttactctagggccatggag

SEQ ID NO: 8758 - DNA, 20 bp, Artificial Sequence
  Description of Artificial Sequence: Synthetic oligonucleotide
ttactctagggccatggagc

SEQ ID NO: 8759 - DNA, 20 bp, Artificial Sequence
  Description of Artificial Sequence: Synthetic oligonucleotide
tactctagggccatggagct

SEQ ID NO: 8760 - DNA, 20 bp, Artificial Sequence
  Description of Artificial Sequence: Synthetic oligonucleotide
actctagggccatggagctg

SEQ ID NO: 8761 - DNA, 20 bp, Artificial Sequence
  Description of Artificial Sequence: Synthetic oligonucleotide
ctctagggccatggagctgc

SEQ ID NO: 8762 - DNA, 20 bp, Artificial Sequence
  Description of Artificial Sequence: Synthetic oligonucleotide
tctagggccatggagctgct

SEQ ID NO: 8763 - DNA, 20 bp, Artificial Sequence
  Description of Artificial Sequence: Synthetic oligonucleotide
ctagggccatggagctgcta

SEQ ID NO: 8764 - DNA, 20 bp, Artificial Sequence
  Description of Artificial Sequence: Synthetic oligonucleotide
tagggccatggagctgctac

SEQ ID NO: 8765 - DNA, 20 bp, Artificial Sequence
  Description of Artificial Sequence: Synthetic oligonucleotide
agggccatggagctgctact

SEQ ID NO: 8766 - DNA, 20 bp, Artificial Sequence
  Description of Artificial Sequence: Synthetic oligonucleotide
gggccatggagctgctactt

SEQ ID NO: 8767 - DNA, 20 bp, Artificial Sequence
  Description of Artificial Sequence: Synthetic oligonucleotide
ggccatggagctgctacttt

SEQ ID NO: 8768 - DNA, 20 bp, Artificial Sequence
  Description of Artificial Sequence: Synthetic oligonucleotide
gccatggagctgctacttta

SEQ ID NO: 8769 - DNA, 20 bp, Artificial Sequence
  Description of Artificial Sequence: Synthetic oligonucleotide
ccatggagctgctactttat

SEQ ID NO: 8770 - DNA, 20 bp, Artificial Sequence
  Description of Artificial Sequence: Synthetic oligonucleotide
catggagctgctactttatg

SEQ ID NO: 8771 - DNA, 20 bp, Artificial Sequence
  Description of Artificial Sequence: Synthetic oligonucleotide
atggagctgctactttatgc

SEQ ID NO: 8772 - DNA, 20 bp, Artificial Sequence
  Description of Artificial Sequence: Synthetic oligonucleotide
tggagctgctactttatgca

SEQ ID NO: 8773 - DNA, 20 bp, Artificial Sequence
  Description of Artificial Sequence: Synthetic oligonucleotide
ggagctgctactttatgcag

SEQ ID NO: 8774 - DNA, 20 bp, Artificial Sequence
  Description of Artificial Sequence: Synthetic oligonucleotide
gagctgctactttatgcagg

SEQ ID NO: 8775 - DNA, 20 bp, Artificial Sequence
  Description of Artificial Sequence: Synthetic oligonucleotide
agctgctactttatgcagga

SEQ ID NO: 8776 - DNA, 20 bp, Artificial Sequence
  Description of Artificial Sequence: Synthetic oligonucleotide
gctgctactttatgcaggat

SEQ ID NO: 8777 - DNA, 20 bp, Artificial Sequence
  Description of Artificial Sequence: Synthetic oligonucleotide
ctgctactttatgcaggatt

SEQ ID NO: 8778 - DNA, 20 bp, Artificial Sequence
  Description of Artificial Sequence: Synthetic oligonucleotide
tgctactttatgcaggattt

SEQ ID NO: 8779 - DNA, 20 bp, Artificial Sequence
  Description of Artificial Sequence: Synthetic oligonucleotide
gctactttatgcaggattta

SEQ ID NO: 8780 - DNA, 20 bp, Artificial Sequence
  Description of Artificial Sequence: Synthetic oligonucleotide
ctactttatgcaggatttaa

SEQ ID NO: 8781 - DNA, 20 bp, Artificial Sequence
  Description of Artificial Sequence: Synthetic oligonucleotide
tactttatgcaggatttaag

SEQ ID NO: 8782 - DNA, 20 bp, Artificial Sequence
  Description of Artificial Sequence: Synthetic oligonucleotide
actttatgcaggatttaagc

SEQ ID NO: 8783 - DNA, 20 bp, Artificial Sequence
  Description of Artificial Sequence: Synthetic oligonucleotide
ctttatgcaggatttaagct

SEQ ID NO: 8784 - DNA, 20 bp, Artificial Sequence
  Description of Artificial Sequence: Synthetic oligonucleotide
tttatgcaggatttaagctc

SEQ ID NO: 8785 - DNA, 20 bp, Artificial Sequence
  Description of Artificial Sequence: Synthetic oligonucleotide
ttatgcaggatttaagctct

SEQ ID NO: 8786 - DNA, 20 bp, Artificial Sequence
  Description of Artificial Sequence: Synthetic oligonucleotide
tatgcaggatttaagctctg

SEQ ID NO: 8787 - DNA, 20 bp, Artificial Sequence
  Description of Artificial Sequence: Synthetic oligonucleotide
atgcaggatttaagctctgt

SEQ ID NO: 8788 - DNA, 20 bp, Artificial Sequence
  Description of Artificial Sequence: Synthetic oligonucleotide
tgcaggatttaagctctgta

SEQ ID NO: 8789 - DNA, 20 bp, Artificial Sequence
  Description of Artificial Sequence: Synthetic oligonucleotide
gcaggatttaagctctgtat

SEQ ID NO: 8790 - DNA, 20 bp, Artificial Sequence
  Description of Artificial Sequence: Synthetic oligonucleotide
caggatttaagctctgtatt

SEQ ID NO: 8791 - DNA, 20 bp, Artificial Sequence
  Description of Artificial Sequence: Synthetic oligonucleotide
aggatttaagctctgtattc

SEQ ID NO: 8792 - DNA, 20 bp, Artificial Sequence
  Description of Artificial Sequence: Synthetic oligonucleotide
ggatttaagctctgtattct

SEQ ID NO: 8793 - DNA, 20 bp, Artificial Sequence
  Description of Artificial Sequence: Synthetic oligonucleotide
gatttaagctctgtattcta

SEQ ID NO: 8794 - DNA, 20 bp, Artificial Sequence
  Description of Artificial Sequence: Synthetic oligonucleotide
atttaagctctgtattctaa

SEQ ID NO: 8795 - DNA, 20 bp, Artificial Sequence
  Description of Artificial Sequence: Synthetic oligonucleotide
tttaagctctgtattctaaa

SEQ ID NO: 8796 - DNA, 20 bp, Artificial Sequence
  Description of Artificial Sequence: Synthetic oligonucleotide
ttaagctctgtattctaaat

SEQ ID NO: 8797 - DNA, 20 bp, Artificial Sequence
  Description of Artificial Sequence: Synthetic oligonucleotide
taagctctgtattctaaata

SEQ ID NO: 8798 - DNA, 20 bp, Artificial Sequence
  Description of Artificial Sequence: Synthetic oligonucleotide
aagctctgtattctaaatat

SEQ ID NO: 8799 - DNA, 20 bp, Artificial Sequence
  Description of Artificial Sequence: Synthetic oligonucleotide
agctctgtattctaaatatc

SEQ ID NO: 8800 - DNA, 20 bp, Artificial Sequence
  Description of Artificial Sequence: Synthetic oligonucleotide
gctctgtattctaaatatca

SEQ ID NO: 8801 - DNA, 20 bp, Artificial Sequence
  Description of Artificial Sequence: Synthetic oligonucleotide
ctctgtattctaaatatcaa

SEQ ID NO: 8802 - DNA, 20 bp, Artificial Sequence
  Description of Artificial Sequence: Synthetic oligonucleotide
tctgtattctaaatatcaaa

SEQ ID NO: 8803 - DNA, 20 bp, Artificial Sequence
  Description of Artificial Sequence: Synthetic oligonucleotide
ctgtattctaaatatcaaag

SEQ ID NO: 8804 - DNA, 20 bp, Artificial Sequence
  Description of Artificial Sequence: Synthetic oligonucleotide
tgtattctaaatatcaaaga

SEQ ID NO: 8805 - DNA, 20 bp, Artificial Sequence
  Description of Artificial Sequence: Synthetic oligonucleotide
gtattctaaatatcaaagag

SEQ ID NO: 8806 - DNA, 20 bp, Artificial Sequence
  Description of Artificial Sequence: Synthetic oligonucleotide
tattctaaatatcaaagagc

SEQ ID NO: 8807 - DNA, 20 bp, Artificial Sequence
  Description of Artificial Sequence: Synthetic oligonucleotide
attctaaatatcaaagagca

SEQ ID NO: 8808 - DNA, 20 bp, Artificial Sequence
  Description of Artificial Sequence: Synthetic oligonucleotide
ttctaaatatcaaagagcat

SEQ ID NO: 8809 - DNA, 20 bp, Artificial Sequence
  Description of Artificial Sequence: Synthetic oligonucleotide
tctaaatatcaaagagcata

SEQ ID NO: 8810 - DNA, 20 bp, Artificial Sequence
  Description of Artificial Sequence: Synthetic oligonucleotide
ctaaatatcaaagagcatag

SEQ ID NO: 8811 - DNA, 20 bp, Artificial Sequence
  Description of Artificial Sequence: Synthetic oligonucleotide
taaatatcaaagagcatagt

SEQ ID NO: 8812 - DNA, 20 bp, Artificial Sequence
  Description of Artificial Sequence: Synthetic oligonucleotide
aaatatcaaagagcatagtg

SEQ ID NO: 8813 - DNA, 20 bp, Artificial Sequence
  Description of Artificial Sequence: Synthetic oligonucleotide
aatatcaaagagcatagtgg

SEQ ID NO: 8814 - DNA, 20 bp, Artificial Sequence
  Description of Artificial Sequence: Synthetic oligonucleotide
atatcaaagagcatagtgga

SEQ ID NO: 8815 - DNA, 20 bp, Artificial Sequence
  Description of Artificial Sequence: Synthetic oligonucleotide
tatcaaagagcatagtggaa

SEQ ID NO: 8816 - DNA, 20 bp, Artificial Sequence
  Description of Artificial Sequence: Synthetic oligonucleotide
atcaaagagcatagtggaag

SEQ ID NO: 8817 - DNA, 20 bp, Artificial Sequence
  Description of Artificial Sequence: Synthetic oligonucleotide
tcaaagagcatagtggaaga

SEQ ID NO: 8818 - DNA, 20 bp, Artificial Sequence
  Description of Artificial Sequence: Synthetic oligonucleotide
caaagagcatagtggaagag

SEQ ID NO: 8819 - DNA, 20 bp, Artificial Sequence
  Description of Artificial Sequence: Synthetic oligonucleotide
aaagagcatagtggaagaga

SEQ ID NO: 8820 - DNA, 20 bp, Artificial Sequence
  Description of Artificial Sequence: Synthetic oligonucleotide
aagagcatagtggaagagac

SEQ ID NO: 8821 - DNA, 20 bp, Artificial Sequence
  Description of Artificial Sequence: Synthetic oligonucleotide
agagcatagtggaagagaca

SEQ ID NO: 8822 - DNA, 20 bp, Artificial Sequence
  Description of Artificial Sequence: Synthetic oligonucleotide
gagcatagtggaagagacag

SEQ ID NO: 8823 - DNA, 20 bp, Artificial Sequence
  Description of Artificial Sequence: Synthetic oligonucleotide
agcatagtggaagagacagc

SEQ ID NO: 8824 - DNA, 20 bp, Artificial Sequence
  Description of Artificial Sequence: Synthetic oligonucleotide
gcatagtggaagagacagcc

SEQ ID NO: 8825 - DNA, 20 bp, Artificial Sequence
  Description of Artificial Sequence: Synthetic oligonucleotide
catagtggaagagacagcct

SEQ ID NO: 8826 - DNA, 20 bp, Artificial Sequence
  Description of Artificial Sequence: Synthetic oligonucleotide
atagtggaagagacagcctt

SEQ ID NO: 8827 - DNA, 20 bp, Artificial Sequence
  Description of Artificial Sequence: Synthetic oligonucleotide
tagtggaagagacagccttt

SEQ ID NO: 8828 - DNA, 20 bp, Artificial Sequence
  Description of Artificial Sequence: Synthetic oligonucleotide
agtggaagagacagcctttt

SEQ ID NO: 8829 - DNA, 20 bp, Artificial Sequence
  Description of Artificial Sequence: Synthetic oligonucleotide
gtggaagagacagccttttc

SEQ ID NO: 8830 - DNA, 20 bp, Artificial Sequence
  Description of Artificial Sequence: Synthetic oligonucleotide
tggaagagacagccttttct

SEQ ID NO: 8831 - DNA, 20 bp, Artificial Sequence
  Description of Artificial Sequence: Synthetic oligonucleotide
ggaagagacagccttttctg

SEQ ID NO: 8832 - DNA, 20 bp, Artificial Sequence
  Description of Artificial Sequence: Synthetic oligonucleotide
gaagagacagccttttctga

SEQ ID NO: 8833 - DNA, 20 bp, Artificial Sequence
  Description of Artificial Sequence: Synthetic oligonucleotide
aagagacagccttttctgat

SEQ ID NO: 8834 - DNA, 20 bp, Artificial Sequence
  Description of Artificial Sequence: Synthetic oligonucleotide
agagacagccttttctgata

SEQ ID NO: 8835 - DNA, 20 bp, Artificial Sequence
  Description of Artificial Sequence: Synthetic oligonucleotide
gagacagccttttctgatag

SEQ ID NO: 8836 - DNA, 20 bp, Artificial Sequence
  Description of Artificial Sequence: Synthetic oligonucleotide
agacagccttttctgatagg

SEQ ID NO: 8837 - DNA, 20 bp, Artificial Sequence
  Description of Artificial Sequence: Synthetic oligonucleotide
gacagccttttctgatagga

SEQ ID NO: 8838 - DNA, 20 bp, Artificial Sequence
  Description of Artificial Sequence: Synthetic oligonucleotide
acagccttttctgataggat

SEQ ID NO: 8839 - DNA, 20 bp, Artificial Sequence
  Description of Artificial Sequence: Synthetic oligonucleotide
cagccttttctgataggatt

SEQ ID NO: 8840 - DNA, 20 bp, Artificial Sequence
  Description of Artificial Sequence: Synthetic oligonucleotide
agccttttctgataggattc

SEQ ID NO: 8841 - DNA, 20 bp, Artificial Sequence
  Description of Artificial Sequence: Synthetic oligonucleotide
gccttttctgataggattca

SEQ ID NO: 8842 - DNA, 20 bp, Artificial Sequence
  Description of Artificial Sequence: Synthetic oligonucleotide
ccttttctgataggattcag

SEQ ID NO: 8843 - DNA, 20 bp, Artificial Sequence
  Description of Artificial Sequence: Synthetic oligonucleotide
cttttctgataggattcaga

SEQ ID NO: 8844 - DNA, 20 bp, Artificial Sequence
  Description of Artificial Sequence: Synthetic oligonucleotide
ttttctgataggattcagag

SEQ ID NO: 8845 - DNA, 20 bp, Artificial Sequence
  Description of Artificial Sequence: Synthetic oligonucleotide
tttctgataggattcagaga

SEQ ID NO: 8846 - DNA, 20 bp, Artificial Sequence
  Description of Artificial Sequence: Synthetic oligonucleotide
ttctgataggattcagagac

SEQ ID NO: 8847 - DNA, 20 bp, Artificial Sequence
  Description of Artificial Sequence: Synthetic oligonucleotide
tctgataggattcagagact

SEQ ID NO: 8848 - DNA, 20 bp, Artificial Sequence
  Description of Artificial Sequence: Synthetic oligonucleotide
ctgataggattcagagactg

SEQ ID NO: 8849 - DNA, 20 bp, Artificial Sequence
  Description of Artificial Sequence: Synthetic oligonucleotide
tgataggattcagagactgc

SEQ ID NO: 8850 - DNA, 20 bp, Artificial Sequence
  Description of Artificial Sequence: Synthetic oligonucleotide
gataggattcagagactgcg

SEQ ID NO: 8851 - DNA, 20 bp, Artificial Sequence
  Description of Artificial Sequence: Synthetic oligonucleotide
ataggattcagagactgcgg

SEQ ID NO: 8852 - DNA, 20 bp, Artificial Sequence
  Description of Artificial Sequence: Synthetic oligonucleotide
taggattcagagactgcggc

SEQ ID NO: 8853 - DNA, 20 bp, Artificial Sequence
  Description of Artificial Sequence: Synthetic oligonucleotide
aggattcagagactgcggcc

SEQ ID NO: 8854 - DNA, 20 bp, Artificial Sequence
  Description of Artificial Sequence: Synthetic oligonucleotide
ggattcagagactgcggccc

SEQ ID NO: 8855 - DNA, 20 bp, Artificial Sequence
  Description of Artificial Sequence: Synthetic oligonucleotide
gattcagagactgcggccct

SEQ ID NO: 8856 - DNA, 20 bp, Artificial Sequence
  Description of Artificial Sequence: Synthetic oligonucleotide
attcagagactgcggccctt

SEQ ID NO: 8857 - DNA, 20 bp, Artificial Sequence
  Description of Artificial Sequence: Synthetic oligonucleotide
ttcagagactgcggccctta

SEQ ID NO: 8858 - DNA, 20 bp, Artificial Sequence
  Description of Artificial Sequence: Synthetic oligonucleotide
tcagagactgcggcccttac

SEQ ID NO: 8859 - DNA, 20 bp, Artificial Sequence
  Description of Artificial Sequence: Synthetic oligonucleotide
cagagactgcggcccttact

SEQ ID NO: 8860 - DNA, 20 bp, Artificial Sequence
  Description of Artificial Sequence: Synthetic oligonucleotide
agagactgcggcccttacta

SEQ ID NO: 8861 - DNA, 20 bp, Artificial Sequence
  Description of Artificial Sequence: Synthetic oligonucleotide
gagactgcggcccttactat

SEQ ID NO: 8862 - DNA, 20 bp, Artificial Sequence
  Description of Artificial Sequence: Synthetic oligonucleotide
agactgcggcccttactatc

SEQ ID NO: 8863 - DNA, 20 bp, Artificial Sequence
  Description of Artificial Sequence: Synthetic oligonucleotide
gactgcggcccttactatcc

SEQ ID NO: 8864 - DNA, 20 bp, Artificial Sequence
  Description of Artificial Sequence: Synthetic oligonucleotide
actgcggcccttactatcca

SEQ ID NO: 8865 - DNA, 20 bp, Artificial Sequence
  Description of Artificial Sequence: Synthetic oligonucleotide
ctgcggcccttactatccaa

SEQ ID NO: 8866 - DNA, 20 bp, Artificial Sequence
  Description of Artificial Sequence: Synthetic oligonucleotide
tgcggcccttactatccaag

SEQ ID NO: 8867 - DNA, 20 bp, Artificial Sequence
  Description of Artificial Sequence: Synthetic oligonucleotide
gcggcccttactatccaaga

SEQ ID NO: 8868 - DNA, 20 bp, Artificial Sequence
  Description of Artificial Sequence: Synthetic oligonucleotide
cggcccttactatccaagag

SEQ ID NO: 8869 - DNA, 20 bp, Artificial Sequence
  Description of Artificial Sequence: Synthetic oligonucleotide
ggcccttactatccaagaga

SEQ ID NO: 8870 - DNA, 20 bp, Artificial Sequence
  Description of Artificial Sequence: Synthetic oligonucleotide
gcccttactatccaagagaa

SEQ ID NO: 8871 - DNA, 20 bp, Artificial Sequence
  Description of Artificial Sequence: Synthetic oligonucleotide
cccttactatccaagagaag

SEQ ID NO: 8872 - DNA, 20 bp, Artificial Sequence
  Description of Artificial Sequence: Synthetic oligonucleotide
ccttactatccaagagaagc

SEQ ID NO: 8873 - DNA, 20 bp, Artificial Sequence
  Description of Artificial Sequence: Synthetic oligonucleotide
cttactatccaagagaagct

SEQ ID NO: 8874 - DNA, 20 bp, Artificial Sequence
  Description of Artificial Sequence: Synthetic oligonucleotide
ttactatccaagagaagctt

SEQ ID NO: 8875 - DNA, 20 bp, Artificial Sequence
  Description of Artificial Sequence: Synthetic oligonucleotide
tactatccaagagaagcttc

SEQ ID NO: 8876 - DNA, 20 bp, Artificial Sequence
  Description of Artificial Sequence: Synthetic oligonucleotide
actatccaagagaagcttcc

SEQ ID NO: 8877 - DNA, 20 bp, Artificial Sequence
  Description of Artificial Sequence: Synthetic oligonucleotide
ctatccaagagaagcttcct

SEQ ID NO: 8878 - DNA, 20 bp, Artificial Sequence
  Description of Artificial Sequence: Synthetic oligonucleotide
tatccaagagaagcttcctg

SEQ ID NO: 8879 - DNA, 20 bp, Artificial Sequence
  Description of Artificial Sequence: Synthetic oligonucleotide
atccaagagaagcttcctgc

SEQ ID NO: 8880 - DNA, 20 bp, Artificial Sequence
  Description of Artificial Sequence: Synthetic oligonucleotide
tccaagagaagcttcctgcc

SEQ ID NO: 8881 - DNA, 20 bp, Artificial Sequence
  Description of Artificial Sequence: Synthetic oligonucleotide
ccaagagaagcttcctgcct

SEQ ID NO: 8882 - DNA, 20 bp, Artificial Sequence
  Description of Artificial Sequence: Synthetic oligonucleotide
caagagaagcttcctgcctg

SEQ ID NO: 8883 - DNA, 20 bp, Artificial Sequence
  Description of Artificial Sequence: Synthetic oligonucleotide
aagagaagcttcctgcctgc

SEQ ID NO: 8884 - DNA, 20 bp, Artificial Sequence
  Description of Artificial Sequence: Synthetic oligonucleotide
agagaagcttcctgcctgct

SEQ ID NO: 8885 - DNA, 20 bp, Artificial Sequence
  Description of Artificial Sequence: Synthetic oligonucleotide
gagaagcttcctgcctgcta

SEQ ID NO: 8886 - DNA, 20 bp, Artificial Sequence
  Description of Artificial Sequence: Synthetic oligonucleotide
agaagcttcctgcctgctat

SEQ ID NO: 8887 - DNA, 20 bp, Artificial Sequence
  Description of Artificial Sequence: Synthetic oligonucleotide
gaagcttcctgcctgctatg

SEQ ID NO: 8888 - DNA, 20 bp, Artificial Sequence
  Description of Artificial Sequence: Synthetic oligonucleotide
aagcttcctgcctgctatgt

SEQ ID NO: 8889 - DNA, 20 bp, Artificial Sequence
  Description of Artificial Sequence: Synthetic oligonucleotide
agcttcctgcctgctatgtc

SEQ ID NO: 8890 - DNA, 20 bp, Artificial Sequence
  Description of Artificial Sequence: Synthetic oligonucleotide
gcttcctgcctgctatgtct

SEQ ID NO: 8891 - DNA, 20 bp, Artificial Sequence
  Description of Artificial Sequence: Synthetic oligonucleotide
cttcctgcctgctatgtctc

SEQ ID NO: 8892 - DNA, 20 bp, Artificial Sequence
  Description of Artificial Sequence: Synthetic oligonucleotide
ttcctgcctgctatgtctcg

SEQ ID NO: 8893 - DNA, 20 bp, Artificial Sequence
  Description of Artificial Sequence: Synthetic oligonucleotide
tcctgcctgctatgtctcgg

SEQ ID NO: 8894 - DNA, 20 bp, Artificial Sequence
  Description of Artificial Sequence: Synthetic oligonucleotide
cctgcctgctatgtctcggg

SEQ ID NO: 8895 - DNA, 20 bp, Artificial Sequence
  Description of Artificial Sequence: Synthetic oligonucleotide
ctgcctgctatgtctcgggg

SEQ ID NO: 8896 - DNA, 20 bp, Artificial Sequence
  Description of Artificial Sequence: Synthetic oligonucleotide
tgcctgctatgtctcggggt

SEQ ID NO: 8897 - DNA, 20 bp, Artificial Sequence
  Description of Artificial Sequence: Synthetic oligonucleotide
gcctgctatgtctcggggtg

SEQ ID NO: 8898 - DNA, 20 bp, Artificial Sequence
  Description of Artificial Sequence: Synthetic oligonucleotide
cctgctatgtctcggggtgc

SEQ ID NO: 8899 - DNA, 20 bp, Artificial Sequence
  Description of Artificial Sequence: Synthetic oligonucleotide
ctgctatgtctcggggtgct

SEQ ID NO: 8900 - DNA, 20 bp, Artificial Sequence
  Description of Artificial Sequence: Synthetic oligonucleotide
tgctatgtctcggggtgctt

SEQ ID NO: 8901 - DNA, 20 bp, Artificial Sequence
  Description of Artificial Sequence: Synthetic oligonucleotide
gctatgtctcggggtgcttt

SEQ ID NO: 8902 - DNA, 20 bp, Artificial Sequence
  Description of Artificial Sequence: Synthetic oligonucleotide
ctatgtctcggggtgctttt

SEQ ID NO: 8903 - DNA, 20 bp, Artificial Sequence
  Description of Artificial Sequence: Synthetic oligonucleotide
tatgtctcggggtgcttttc

SEQ ID NO: 8904 - DNA, 20 bp, Artificial Sequence
  Description of Artificial Sequence: Synthetic oligonucleotide
atgtctcggggtgcttttct

SEQ ID NO: 8905 - DNA, 20 bp, Artificial Sequence
  Description of Artificial Sequence: Synthetic oligonucleotide
tgtctcggggtgcttttctt

SEQ ID NO: 8906 - DNA, 20 bp, Artificial Sequence
  Description of Artificial Sequence: Synthetic oligonucleotide
gtctcggggtgcttttcttg

SEQ ID NO: 8907 - DNA, 20 bp, Artificial Sequence
  Description of Artificial Sequence: Synthetic oligonucleotide
tctcggggtgcttttcttgg

SEQ ID NO: 8908 - DNA, 20 bp, Artificial Sequence
  Description of Artificial Sequence: Synthetic oligonucleotide
ctcggggtgcttttcttggt

SEQ ID NO: 8909 - DNA, 20 bp, Artificial Sequence
  Description of Artificial Sequence: Synthetic oligonucleotide
tcggggtgcttttcttggtg

SEQ ID NO: 8910 - DNA, 20 bp, Artificial Sequence
  Description of Artificial Sequence: Synthetic oligonucleotide
cggggtgcttttcttggtga

SEQ ID NO: 8911 - DNA, 20 bp, Artificial Sequence
  Description of Artificial Sequence: Synthetic oligonucleotide
ggggtgcttttcttggtgac

SEQ ID NO: 8912 - DNA, 20 bp, Artificial Sequence
  Description of Artificial Sequence: Synthetic oligonucleotide
gggtgcttttcttggtgacc

SEQ ID NO: 8913 - DNA, 20 bp, Artificial Sequence
  Description of Artificial Sequence: Synthetic oligonucleotide
ggtgcttttcttggtgacca

SEQ ID NO: 8914 - DNA, 20 bp, Artificial Sequence
  Description of Artificial Sequence: Synthetic oligonucleotide
gtgcttttcttggtgaccac

SEQ ID NO: 8915 - DNA, 20 bp, Artificial Sequence
  Description of Artificial Sequence: Synthetic oligonucleotide
tgcttttcttggtgaccact

SEQ ID NO: 8916 - DNA, 20 bp, Artificial Sequence
  Description of Artificial Sequence: Synthetic oligonucleotide
gcttttcttggtgaccactg

SEQ ID NO: 8917 - DNA, 20 bp, Artificial Sequence
  Description of Artificial Sequence: Synthetic oligonucleotide
cttttcttggtgaccactgc

SEQ ID NO: 8918 - DNA, 20 bp, Artificial Sequence
  Description of Artificial Sequence: Synthetic oligonucleotide
ttttcttggtgaccactgca

SEQ ID NO: 8919 - DNA, 20 bp, Artificial Sequence
  Description of Artificial Sequence: Synthetic oligonucleotide
tttcttggtgaccactgcac

SEQ ID NO: 8920 - DNA, 20 bp, Artificial Sequence
  Description of Artificial Sequence: Synthetic oligonucleotide
ttcttggtgaccactgcact

SEQ ID NO: 8921 - DNA, 20 bp, Artificial Sequence
  Description of Artificial Sequence: Synthetic oligonucleotide
tcttggtgaccactgcactg

SEQ ID NO: 8922 - DNA, 20 bp, Artificial Sequence
  Description of Artificial Sequence: Synthetic oligonucleotide
cttggtgaccactgcactgg

SEQ ID NO: 8923 - DNA, 20 bp, Artificial Sequence
  Description of Artificial Sequence: Synthetic oligonucleotide
ttggtgaccactgcactggg

SEQ ID NO: 8924 - DNA, 20 bp, Artificial Sequence
  Description of Artificial Sequence: Synthetic oligonucleotide
tggtgaccactgcactggga

SEQ ID NO: 8925 - DNA, 20 bp, Artificial Sequence
  Description of Artificial Sequence: Synthetic oligonucleotide
ggtgaccactgcactgggac

SEQ ID NO: 8926 - DNA, 20 bp, Artificial Sequence
  Description of Artificial Sequence: Synthetic oligonucleotide
gtgaccactgcactgggacc

SEQ ID NO: 8927 - DNA, 20 bp, Artificial Sequence
  Description of Artificial Sequence: Synthetic oligonucleotide
tgaccactgcactgggacct

SEQ ID NO: 8928 - DNA, 20 bp, Artificial Sequence
  Description of Artificial Sequence: Synthetic oligonucleotide
gaccactgcactgggacctt

SEQ ID NO: 8929 - DNA, 20 bp, Artificial Sequence
  Description of Artificial Sequence: Synthetic oligonucleotide
accactgcactgggacctta

SEQ ID NO: 8930 - DNA, 20 bp, Artificial Sequence
  Description of Artificial Sequence: Synthetic oligonucleotide
ccactgcactgggaccttag

SEQ ID NO: 8931 - DNA, 20 bp, Artificial Sequence
  Description of Artificial Sequence: Synthetic oligonucleotide
cactgcactgggaccttaga

SEQ ID NO: 8932 - DNA, 20 bp, Artificial Sequence
  Description of Artificial Sequence: Synthetic oligonucleotide
actgcactgggaccttagag

SEQ ID NO: 8933 - DNA, 20 bp, Artificial Sequence
  Description of Artificial Sequence: Synthetic oligonucleotide
ctgcactgggaccttagaga

SEQ ID NO: 8934 - DNA, 20 bp, Artificial Sequence
  Description of Artificial Sequence: Synthetic oligonucleotide
tgcactgggaccttagagag

SEQ ID NO: 8935 - DNA, 20 bp, Artificial Sequence
  Description of Artificial Sequence: Synthetic oligonucleotide
gcactgggaccttagagagg

SEQ ID NO: 8936 - DNA, 20 bp, Artificial Sequence
  Description of Artificial Sequence: Synthetic oligonucleotide
cactgggaccttagagagga

SEQ ID NO: 8937 - DNA, 20 bp, Artificial Sequence
  Description of Artificial Sequence: Synthetic oligonucleotide
actgggaccttagagaggag

SEQ ID NO: 8938 - DNA, 20 bp, Artificial Sequence
  Description of Artificial Sequence: Synthetic oligonucleotide
ctgggaccttagagaggagc

SEQ ID NO: 8939 - DNA, 20 bp, Artificial Sequence
  Description of Artificial Sequence: Synthetic oligonucleotide
tgggaccttagagaggagca

SEQ ID NO: 8940 - DNA, 20 bp, Artificial Sequence
  Description of Artificial Sequence: Synthetic oligonucleotide
gggaccttagagaggagcac

SEQ ID NO: 8941 - DNA, 20 bp, Artificial Sequence
  Description of Artificial Sequence: Synthetic oligonucleotide
ggaccttagagaggagcacc

SEQ ID NO: 8942 - DNA, 20 bp, Artificial Sequence
  Description of Artificial Sequence: Synthetic oligonucleotide
gaccttagagaggagcacca

SEQ ID NO: 8943 - DNA, 20 bp, Artificial Sequence
  Description of Artificial Sequence: Synthetic oligonucleotide
accttagagaggagcaccaa

SEQ ID NO: 8944 - DNA, 20 bp, Artificial Sequence
  Description of Artificial Sequence: Synthetic oligonucleotide
ccttagagaggagcaccaag

SEQ ID NO: 8945 - DNA, 20 bp, Artificial Sequence
  Description of Artificial Sequence: Synthetic oligonucleotide
cttagagaggagcaccaaga

SEQ ID NO: 8946 - DNA, 20 bp, Artificial Sequence
  Description of Artificial Sequence: Synthetic oligonucleotide
ttagagaggagcaccaagat

SEQ ID NO: 8947 - DNA, 20 bp, Artificial Sequence
  Description of Artificial Sequence: Synthetic oligonucleotide
tagagaggagcaccaagatg

SEQ ID NO: 8948 - DNA, 20 bp, Artificial Sequence
  Description of Artificial Sequence: Synthetic oligonucleotide
agagaggagcaccaagatgg

SEQ ID NO: 8949 - DNA, 20 bp, Artificial Sequence
  Description of Artificial Sequence: Synthetic oligonucleotide
gagaggagcaccaagatggc

SEQ ID NO: 8950 - DNA, 20 bp, Artificial Sequence
  Description of Artificial Sequence: Synthetic oligonucleotide
agaggagcaccaagatggca

SEQ ID NO: 8951 - DNA, 20 bp, Artificial Sequence
  Description of Artificial Sequence: Synthetic oligonucleotide
gaggagcaccaagatggcag

SEQ ID NO: 8952 - DNA, 20 bp, Artificial Sequence
  Description of Artificial Sequence: Synthetic oligonucleotide
aggagcaccaagatggcaga

SEQ ID NO: 8953 - DNA, 20 bp, Artificial Sequence
  Description of Artificial Sequence: Synthetic oligonucleotide
ggagcaccaagatggcagat

SEQ ID NO: 8954 - DNA, 20 bp, Artificial Sequence
  Description of Artificial Sequence: Synthetic oligonucleotide
gagcaccaagatggcagatg

SEQ ID NO: 8955 - DNA, 20 bp, Artificial Sequence
  Description of Artificial Sequence: Synthetic oligonucleotide
agcaccaagatggcagatgg

SEQ ID NO: 8956 - DNA, 20 bp, Artificial Sequence
  Description of Artificial Sequence: Synthetic oligonucleotide
gcaccaagatggcagatggg

SEQ ID NO: 8957 - DNA, 20 bp, Artificial Sequence
  Description of Artificial Sequence: Synthetic oligonucleotide
caccaagatggcagatggga

SEQ ID NO: 8958 - DNA, 20 bp, Artificial Sequence
  Description of Artificial Sequence: Synthetic oligonucleotide
accaagatggcagatgggag

SEQ ID NO: 8959 - DNA, 20 bp, Artificial Sequence
  Description of Artificial Sequence: Synthetic oligonucleotide
ccaagatggcagatgggagt

SEQ ID NO: 8960 - DNA, 20 bp, Artificial Sequence
  Description of Artificial Sequence: Synthetic oligonucleotide
caagatggcagatgggagtt

SEQ ID NO: 8961 - DNA, 20 bp, Artificial Sequence
  Description of Artificial Sequence: Synthetic oligonucleotide
aagatggcagatgggagttg

SEQ ID NO: 8962 - DNA, 20 bp, Artificial Sequence
  Description of Artificial Sequence: Synthetic oligonucleotide
agatggcagatgggagttgt

SEQ ID NO: 8963 - DNA, 20 bp, Artificial Sequence
  Description of Artificial Sequence: Synthetic oligonucleotide
gatggcagatgggagttgtc

SEQ ID NO: 8964 - DNA, 20 bp, Artificial Sequence
  Description of Artificial Sequence: Synthetic oligonucleotide
atggcagatgggagttgtct

SEQ ID NO: 8965 - DNA, 20 bp, Artificial Sequence
  Description of Artificial Sequence: Synthetic oligonucleotide
tggcagatgggagttgtctg

SEQ ID NO: 8966 - DNA, 20 bp, Artificial Sequence
  Description of Artificial Sequence: Synthetic oligonucleotide
ggcagatgggagttgtctga

SEQ ID NO: 8967 - DNA, 20 bp, Artificial Sequence
  Description of Artificial Sequence: Synthetic oligonucleotide
gcagatgggagttgtctgag

SEQ ID NO: 8968 - DNA, 20 bp, Artificial Sequence
  Description of Artificial Sequence: Synthetic oligonucleotide
cagatgggagttgtctgagg

SEQ ID NO: 8969 - DNA, 20 bp, Artificial Sequence
  Description of Artificial Sequence: Synthetic oligonucleotide
agatgggagttgtctgaggc

SEQ ID NO: 8970 - DNA, 20 bp, Artificial Sequence
  Description of Artificial Sequence: Synthetic oligonucleotide
gatgggagttgtctgaggca

SEQ ID NO: 8971 - DNA, 20 bp, Artificial Sequence
  Description of Artificial Sequence: Synthetic oligonucleotide
atgggagttgtctgaggcac

SEQ ID NO: 8972 - DNA, 20 bp, Artificial Sequence
  Description of Artificial Sequence: Synthetic oligonucleotide
tgggagttgtctgaggcaca

SEQ ID NO: 8973 - DNA, 20 bp, Artificial Sequence
  Description of Artificial Sequence: Synthetic oligonucleotide
gggagttgtctgaggcacat

SEQ ID NO: 8974 - DNA, 20 bp, Artificial Sequence
  Description of Artificial Sequence: Synthetic oligonucleotide
ggagttgtctgaggcacata

SEQ ID NO: 8975 - DNA, 20 bp, Artificial Sequence
  Description of Artificial Sequence: Synthetic oligonucleotide
gagttgtctgaggcacatag

SEQ ID NO: 8976 - DNA, 20 bp, Artificial Sequence
  Description of Artificial Sequence: Synthetic oligonucleotide
agttgtctgaggcacatagg

SEQ ID NO: 8977 - DNA, 20 bp, Artificial Sequence
  Description of Artificial Sequence: Synthetic oligonucleotide
gttgtctgaggcacataggt

SEQ ID NO: 8978 - DNA, 20 bp, Artificial Sequence
  Description of Artificial Sequence: Synthetic oligonucleotide
ttgtctgaggcacataggtt

SEQ ID NO: 8979 - DNA, 20 bp, Artificial Sequence
  Description of Artificial Sequence: Synthetic oligonucleotide
tgtctgaggcacataggttc

SEQ ID NO: 8980 - DNA, 20 bp, Artificial Sequence
  Description of Artificial Sequence: Synthetic oligonucleotide
gtctgaggcacataggttct

SEQ ID NO: 8981 - DNA, 20 bp, Artificial Sequence
  Description of Artificial Sequence: Synthetic oligonucleotide
tctgaggcacataggttctc

SEQ ID NO: 8982 - DNA, 20 bp, Artificial Sequence
  Description of Artificial Sequence: Synthetic oligonucleotide
ctgaggcacataggttctct

SEQ ID NO: 8983 - DNA, 20 bp, Artificial Sequence
  Description of Artificial Sequence: Synthetic oligonucleotide
tgaggcacataggttctctt

SEQ ID NO: 8984 - DNA, 20 bp, Artificial Sequence
  Description of Artificial Sequence: Synthetic oligonucleotide
gaggcacataggttctcttg

SEQ ID NO: 8985 - DNA, 20 bp, Artificial Sequence
  Description of Artificial Sequence: Synthetic oligonucleotide
aggcacataggttctcttgc

SEQ ID NO: 8986 - DNA, 20 bp, Artificial Sequence
  Description of Artificial Sequence: Synthetic oligonucleotide
ggcacataggttctcttgca

SEQ ID NO: 8987 - DNA, 20 bp, Artificial Sequence
  Description of Artificial Sequence: Synthetic oligonucleotide
gcacataggttctcttgcag

SEQ ID NO: 8988 - DNA, 20 bp, Artificial Sequence
  Description of Artificial Sequence: Synthetic oligonucleotide
cacataggttctcttgcaga

SEQ ID NO: 8989 - DNA, 20 bp, Artificial Sequence
  Description of Artificial Sequence: Synthetic oligonucleotide
acataggttctcttgcagag

SEQ ID NO: 8990 - DNA, 20 bp, Artificial Sequence
  Description of Artificial Sequence: Synthetic oligonucleotide
cataggttctcttgcagagc

SEQ ID NO: 8991 - DNA, 20 bp, Artificial Sequence
  Description of Artificial Sequence: Synthetic oligonucleotide
ataggttctcttgcagagca

SEQ ID NO: 8992 - DNA, 20 bp, Artificial Sequence
  Description of Artificial Sequence: Synthetic oligonucleotide
taggttctcttgcagagcac

SEQ ID NO: 8993 - DNA, 20 bp, Artificial Sequence
  Description of Artificial Sequence: Synthetic oligonucleotide
aggttctcttgcagagcacc

SEQ ID NO: 8994 - DNA, 20 bp, Artificial Sequence
  Description of Artificial Sequence: Synthetic oligonucleotide
ggttctcttgcagagcacct

SEQ ID NO: 8995 - DNA, 20 bp, Artificial Sequence
  Description of Artificial Sequence: Synthetic oligonucleotide
gttctcttgcagagcacctt

SEQ ID NO: 8996 - DNA, 20 bp, Artificial Sequence
  Description of Artificial Sequence: Synthetic oligonucleotide
ttctcttgcagagcaccttg

SEQ ID NO: 8997 - DNA, 20 bp, Artificial Sequence
  Description of Artificial Sequence: Synthetic oligonucleotide
tctcttgcagagcaccttgg

SEQ ID NO: 8998 - DNA, 20 bp, Artificial Sequence
  Description of Artificial Sequence: Synthetic oligonucleotide
ctcttgcagagcaccttggg

SEQ ID NO: 8999 - DNA, 20 bp, Artificial Sequence
  Description of Artificial Sequence: Synthetic oligonucleotide
tcttgcagagcaccttggga

SEQ ID NO: 9000 - DNA, 20 bp, Artificial Sequence
  Description of Artificial Sequence: Synthetic oligonucleotide
cttgcagagcaccttgggaa

SEQ ID NO: 9001 - DNA, 20 bp, Artificial Sequence
  Description of Artificial Sequence: Synthetic oligonucleotide
ttgcagagcaccttgggaaa

SEQ ID NO: 9002 - DNA, 20 bp, Artificial Sequence
  Description of Artificial Sequence: Synthetic oligonucleotide
tgcagagcaccttgggaaag

SEQ ID NO: 9003 - DNA, 20 bp, Artificial Sequence
  Description of Artificial Sequence: Synthetic oligonucleotide
gcagagcaccttgggaaagg

SEQ ID NO: 9004 - DNA, 20 bp, Artificial Sequence
  Description of Artificial Sequence: Synthetic oligonucleotide
cagagcaccttgggaaaggg

SEQ ID NO: 9005 - DNA, 20 bp, Artificial Sequence
  Description of Artificial Sequence: Synthetic oligonucleotide
agagcaccttgggaaaggga

SEQ ID NO: 9006 - DNA, 20 bp, Artificial Sequence
  Description of Artificial Sequence: Synthetic oligonucleotide
gagcaccttgggaaagggag

SEQ ID NO: 9007 - DNA, 20 bp, Artificial Sequence
  Description of Artificial Sequence: Synthetic oligonucleotide
agcaccttgggaaagggagg

SEQ ID NO: 9008 - DNA, 20 bp, Artificial Sequence
  Description of Artificial Sequence: Synthetic oligonucleotide
gcaccttgggaaagggaggt

SEQ ID NO: 9009 - DNA, 20 bp, Artificial Sequence
  Description of Artificial Sequence: Synthetic oligonucleotide
caccttgggaaagggaggta

SEQ ID NO: 9010 - DNA, 20 bp, Artificial Sequence
  Description of Artificial Sequence: Synthetic oligonucleotide
accttgggaaagggaggtag

SEQ ID NO: 9011 - DNA, 20 bp, Artificial Sequence
  Description of Artificial Sequence: Synthetic oligonucleotide
ccttgggaaagggaggtaga

SEQ ID NO: 9012 - DNA, 20 bp, Artificial Sequence
  Description of Artificial Sequence: Synthetic oligonucleotide
cttgggaaagggaggtagag

SEQ ID NO: 9013 - DNA, 20 bp, Artificial Sequence
  Description of Artificial Sequence: Synthetic oligonucleotide
ttgggaaagggaggtagagt

SEQ ID NO: 9014 - DNA, 20 bp, Artificial Sequence
  Description of Artificial Sequence: Synthetic oligonucleotide
tgggaaagggaggtagagta

SEQ ID NO: 9015 - DNA, 20 bp, Artificial Sequence
  Description of Artificial Sequence: Synthetic oligonucleotide
gggaaagggaggtagagtac

SEQ ID NO: 9016 - DNA, 20 bp, Artificial Sequence
  Description of Artificial Sequence: Synthetic oligonucleotide
ggaaagggaggtagagtacg

SEQ ID NO: 9017 - DNA, 20 bp, Artificial Sequence
  Description of Artificial Sequence: Synthetic oligonucleotide
gaaagggaggtagagtacgt

SEQ ID NO: 9018 - DNA, 20 bp, Artificial Sequence
  Description of Artificial Sequence: Synthetic oligonucleotide
aaagggaggtagagtacgtg

SEQ ID NO: 9019 - DNA, 20 bp, Artificial Sequence
  Description of Artificial Sequence: Synthetic oligonucleotide
aagggaggtagagtacgtgt

SEQ ID NO: 9020 - DNA, 20 bp, Artificial Sequence
  Description of Artificial Sequence: Synthetic oligonucleotide
agggaggtagagtacgtgtg

SEQ ID NO: 9021 - DNA, 20 bp, Artificial Sequence
  Description of Artificial Sequence: Synthetic oligonucleotide
gggaggtagagtacgtgtgc

SEQ ID NO: 9022 - DNA, 20 bp, Artificial Sequence
  Description of Artificial Sequence: Synthetic oligonucleotide
ggaggtagagtacgtgtgcc

SEQ ID NO: 9023 - DNA, 20 bp, Artificial Sequence
  Description of Artificial Sequence: Synthetic oligonucleotide
gaggtagagtacgtgtgcct

SEQ ID NO: 9024 - DNA, 20 bp, Artificial Sequence
  Description of Artificial Sequence: Synthetic oligonucleotide
aggtagagtacgtgtgcctt

SEQ ID NO: 9025 - DNA, 20 bp, Artificial Sequence
  Description of Artificial Sequence: Synthetic oligonucleotide
ggtagagtacgtgtgccttc

SEQ ID NO: 9026 - DNA, 20 bp, Artificial Sequence
  Description of Artificial Sequence: Synthetic oligonucleotide
gtagagtacgtgtgccttcg

SEQ ID NO: 9027 - DNA, 20 bp, Artificial Sequence
  Description of Artificial Sequence: Synthetic oligonucleotide
tagagtacgtgtgccttcgc

SEQ ID NO: 9028 - DNA, 20 bp, Artificial Sequence
  Description of Artificial Sequence: Synthetic oligonucleotide
agagtacgtgtgccttcgcc

SEQ ID NO: 9029 - DNA, 20 bp, Artificial Sequence
  Description of Artificial Sequence: Synthetic oligonucleotide
gagtacgtgtgccttcgcca

SEQ ID NO: 9030 - DNA, 20 bp, Artificial Sequence
  Description of Artificial Sequence: Synthetic oligonucleotide
agtacgtgtgccttcgccat

SEQ ID NO: 9031 - DNA, 20 bp, Artificial Sequence
  Description of Artificial Sequence: Synthetic oligonucleotide
gtacgtgtgccttcgccatc

SEQ ID NO: 9032 - DNA, 20 bp, Artificial Sequence
  Description of Artificial Sequence: Synthetic oligonucleotide
tacgtgtgccttcgccatca

SEQ ID NO: 9033 - DNA, 20 bp, Artificial Sequence
  Description of Artificial Sequence: Synthetic oligonucleotide
acgtgtgccttcgccatcac

SEQ ID NO: 9034 - DNA, 20 bp, Artificial Sequence
  Description of Artificial Sequence: Synthetic oligonucleotide
cgtgtgccttcgccatcact

SEQ ID NO: 9035 - DNA, 20 bp, Artificial Sequence
  Description of Artificial Sequence: Synthetic oligonucleotide
gtgtgccttcgccatcacta

SEQ ID NO: 9036 - DNA, 20 bp, Artificial Sequence
  Description of Artificial Sequence: Synthetic oligonucleotide
tgtgccttcgccatcactat

SEQ ID NO: 9037 - DNA, 20 bp, Artificial Sequence
  Description of Artificial Sequence: Synthetic oligonucleotide
gtgccttcgccatcactatt

SEQ ID NO: 9038 - DNA, 20 bp, Artificial Sequence
  Description of Artificial Sequence: Synthetic oligonucleotide
tgccttcgccatcactattc

SEQ ID NO: 9039 - DNA, 20 bp, Artificial Sequence
  Description of Artificial Sequence: Synthetic oligonucleotide
gccttcgccatcactattct

SEQ ID NO: 9040 - DNA, 20 bp, Artificial Sequence
  Description of Artificial Sequence: Synthetic oligonucleotide
ccttcgccatcactattctt

SEQ ID NO: 9041 - DNA, 20 bp, Artificial Sequence
  Description of Artificial Sequence: Synthetic oligonucleotide
cttcgccatcactattcttc

SEQ ID NO: 9042 - DNA, 20 bp, Artificial Sequence
  Description of Artificial Sequence: Synthetic oligonucleotide
ttcgccatcactattcttca

SEQ ID NO: 9043 - DNA, 20 bp, Artificial Sequence
  Description of Artificial Sequence: Synthetic oligonucleotide
tcgccatcactattcttcat

SEQ ID NO: 9044 - DNA, 20 bp, Artificial Sequence
  Description of Artificial Sequence: Synthetic oligonucleotide
cgccatcactattcttcatt

SEQ ID NO: 9045 - DNA, 20 bp, Artificial Sequence
  Description of Artificial Sequence: Synthetic oligonucleotide
gccatcactattcttcattt

SEQ ID NO: 9046 - DNA, 20 bp, Artificial Sequence
  Description of Artificial Sequence: Synthetic oligonucleotide
ccatcactattcttcatttc

SEQ ID NO: 9047 - DNA, 20 bp, Artificial Sequence
  Description of Artificial Sequence: Synthetic oligonucleotide
catcactattcttcatttcg

SEQ ID NO: 9048 - DNA, 20 bp, Artificial Sequence
  Description of Artificial Sequence: Synthetic oligonucleotide
atcactattcttcatttcgt

SEQ ID NO: 9049 - DNA, 20 bp, Artificial Sequence
  Description of Artificial Sequence: Synthetic oligonucleotide
tcactattcttcatttcgtc

SEQ ID NO: 9050 - DNA, 20 bp, Artificial Sequence
  Description of Artificial Sequence: Synthetic oligonucleotide
cactattcttcatttcgtct

SEQ ID NO: 9051 - DNA, 20 bp, Artificial Sequence
  Description of Artificial Sequence: Synthetic oligonucleotide
actattcttcatttcgtctt

SEQ ID NO: 9052 - DNA, 20 bp, Artificial Sequence
  Description of Artificial Sequence: Synthetic oligonucleotide
ctattcttcatttcgtctta

SEQ ID NO: 9053 - DNA, 20 bp, Artificial Sequence
  Description of Artificial Sequence: Synthetic oligonucleotide
tattcttcatttcgtcttag

SEQ ID NO: 9054 - DNA, 20 bp, Artificial Sequence
  Description of Artificial Sequence: Synthetic oligonucleotide
attcttcatttcgtcttagt

SEQ ID NO: 9055 - DNA, 20 bp, Artificial Sequence
  Description of Artificial Sequence: Synthetic oligonucleotide
ttcttcatttcgtcttagtg

SEQ ID NO: 9056 - DNA, 20 bp, Artificial Sequence
  Description of Artificial Sequence: Synthetic oligonucleotide
tcttcatttcgtcttagtgg

SEQ ID NO: 9057 - DNA, 20 bp, Artificial Sequence
  Description of Artificial Sequence: Synthetic oligonucleotide
cttcatttcgtcttagtggt

SEQ ID NO: 9058 - DNA, 20 bp, Artificial Sequence
  Description of Artificial Sequence: Synthetic oligonucleotide
ttcatttcgtcttagtggtg

SEQ ID NO: 9059 - DNA, 20 bp, Artificial Sequence
  Description of Artificial Sequence: Synthetic oligonucleotide
tcatttcgtcttagtggtga

SEQ ID NO: 9060 - DNA, 20 bp, Artificial Sequence
  Description of Artificial Sequence: Synthetic oligonucleotide
catttcgtcttagtggtgaa

SEQ ID NO: 9061 - DNA, 20 bp, Artificial Sequence
  Description of Artificial Sequence: Synthetic oligonucleotide
atttcgtcttagtggtgaaa

SEQ ID NO: 9062 - DNA, 20 bp, Artificial Sequence
  Description of Artificial Sequence: Synthetic oligonucleotide
tttcgtcttagtggtgaaag

SEQ ID NO: 9063 - DNA, 20 bp, Artificial Sequence
  Description of Artificial Sequence: Synthetic oligonucleotide
ttcgtcttagtggtgaaagc

SEQ ID NO: 9064 - DNA, 20 bp, Artificial Sequence
  Description of Artificial Sequence: Synthetic oligonucleotide
tcgtcttagtggtgaaagca

SEQ ID NO: 9065 - DNA, 20 bp, Artificial Sequence
  Description of Artificial Sequence: Synthetic oligonucleotide
cgtcttagtggtgaaagcac

SEQ ID NO: 9066 - DNA, 20 bp, Artificial Sequence
  Description of Artificial Sequence: Synthetic oligonucleotide
gtcttagtggtgaaagcacc

SEQ ID NO: 9067 - DNA, 20 bp, Artificial Sequence
  Description of Artificial Sequence: Synthetic oligonucleotide
tcttagtggtgaaagcacca

SEQ ID NO: 9068 - DNA, 20 bp, Artificial Sequence
  Description of Artificial Sequence: Synthetic oligonucleotide
cttagtggtgaaagcaccaa

SEQ ID NO: 9069 - DNA, 20 bp, Artificial Sequence
  Description of Artificial Sequence: Synthetic oligonucleotide
ttagtggtgaaagcaccaac

SEQ ID NO: 9070 - DNA, 20 bp, Artificial Sequence
  Description of Artificial Sequence: Synthetic oligonucleotide
tagtggtgaaagcaccaact

SEQ ID NO: 9071 - DNA, 20 bp, Artificial Sequence
  Description of Artificial Sequence: Synthetic oligonucleotide
agtggtgaaagcaccaactt

SEQ ID NO: 9072 - DNA, 20 bp, Artificial Sequence
  Description of Artificial Sequence: Synthetic oligonucleotide
gtggtgaaagcaccaactta

SEQ ID NO: 9073 - DNA, 20 bp, Artificial Sequence
  Description of Artificial Sequence: Synthetic oligonucleotide
tggtgaaagcaccaacttac

SEQ ID NO: 9074 - DNA, 20 bp, Artificial Sequence
  Description of Artificial Sequence: Synthetic oligonucleotide
ggtgaaagcaccaacttact

SEQ ID NO: 9075 - DNA, 20 bp, Artificial Sequence
  Description of Artificial Sequence: Synthetic oligonucleotide
gtgaaagcaccaacttactg

SEQ ID NO: 9076 - DNA, 20 bp, Artificial Sequence
  Description of Artificial Sequence: Synthetic oligonucleotide
tgaaagcaccaacttactgc

SEQ ID NO: 9077 - DNA, 20 bp, Artificial Sequence
  Description of Artificial Sequence: Synthetic oligonucleotide
gaaagcaccaacttactgct

SEQ ID NO: 9078 - DNA, 20 bp, Artificial Sequence
  Description of Artificial Sequence: Synthetic oligonucleotide
aaagcaccaacttactgctt

SEQ ID NO: 9079 - DNA, 20 bp, Artificial Sequence
  Description of Artificial Sequence: Synthetic oligonucleotide
aagcaccaacttactgcttc

SEQ ID NO: 9080 - DNA, 20 bp, Artificial Sequence
  Description of Artificial Sequence: Synthetic oligonucleotide
agcaccaacttactgcttcc

SEQ ID NO: 9081 - DNA, 20 bp, Artificial Sequence
  Description of Artificial Sequence: Synthetic oligonucleotide
gcaccaacttactgcttcct

SEQ ID NO: 9082 - DNA, 20 bp, Artificial Sequence
  Description of Artificial Sequence: Synthetic oligonucleotide
caccaacttactgcttcctc

SEQ ID NO: 9083 - DNA, 20 bp, Artificial Sequence
  Description of Artificial Sequence: Synthetic oligonucleotide
accaacttactgcttcctct

SEQ ID NO: 9084 - DNA, 20 bp, Artificial Sequence
  Description of Artificial Sequence: Synthetic oligonucleotide
ccaacttactgcttcctcta

SEQ ID NO: 9085 - DNA, 20 bp, Artificial Sequence
  Description of Artificial Sequence: Synthetic oligonucleotide
caacttactgcttcctctaa

SEQ ID NO: 9086 - DNA, 20 bp, Artificial Sequence
  Description of Artificial Sequence: Synthetic oligonucleotide
aacttactgcttcctctaag

SEQ ID NO: 9087 - DNA, 20 bp, Artificial Sequence
  Description of Artificial Sequence: Synthetic oligonucleotide
acttactgcttcctctaagg

SEQ ID NO: 9088 - DNA, 20 bp, Artificial Sequence
  Description of Artificial Sequence: Synthetic oligonucleotide
cttactgcttcctctaaggg

SEQ ID NO: 9089 - DNA, 20 bp, Artificial Sequence
  Description of Artificial Sequence: Synthetic oligonucleotide
ttactgcttcctctaaggga

SEQ ID NO: 9090 - DNA, 20 bp, Artificial Sequence
  Description of Artificial Sequence: Synthetic oligonucleotide
tactgcttcctctaagggac

SEQ ID NO: 9091 - DNA, 20 bp, Artificial Sequence
  Description of Artificial Sequence: Synthetic oligonucleotide
actgcttcctctaagggact

SEQ ID NO: 9092 - DNA, 20 bp, Artificial Sequence
  Description of Artificial Sequence: Synthetic oligonucleotide
ctgcttcctctaagggacta

SEQ ID NO: 9093 - DNA, 20 bp, Artificial Sequence
  Description of Artificial Sequence: Synthetic oligonucleotide
tgcttcctctaagggactac

SEQ ID NO: 9094 - DNA, 20 bp, Artificial Sequence
  Description of Artificial Sequence: Synthetic oligonucleotide
gcttcctctaagggactacc

SEQ ID NO: 9095 - DNA, 20 bp, Artificial Sequence
  Description of Artificial Sequence: Synthetic oligonucleotide
cttcctctaagggactacct

SEQ ID NO: 9096 - DNA, 20 bp, Artificial Sequence
  Description of Artificial Sequence: Synthetic oligonucleotide
ttcctctaagggactaccta

SEQ ID NO: 9097 - DNA, 20 bp, Artificial Sequence
  Description of Artificial Sequence: Synthetic oligonucleotide
tcctctaagggactacctac

SEQ ID NO: 9098 - DNA, 20 bp, Artificial Sequence
  Description of Artificial Sequence: Synthetic oligonucleotide
cctctaagggactacctact

SEQ ID NO: 9099 - DNA, 20 bp, Artificial Sequence
  Description of Artificial Sequence: Synthetic oligonucleotide
ctctaagggactacctactt

SEQ ID NO: 9100 - DNA, 20 bp, Artificial Sequence
  Description of Artificial Sequence: Synthetic oligonucleotide
tctaagggactacctactta

SEQ ID NO: 9101 - DNA, 20 bp, Artificial Sequence
  Description of Artificial Sequence: Synthetic oligonucleotide
ctaagggactacctacttat

SEQ ID NO: 9102 - DNA, 20 bp, Artificial Sequence
  Description of Artificial Sequence: Synthetic oligonucleotide
taagggactacctacttata

SEQ ID NO: 9103 - DNA, 20 bp, Artificial Sequence
  Description of Artificial Sequence: Synthetic oligonucleotide
aagggactacctacttatag

SEQ ID NO: 9104 - DNA, 20 bp, Artificial Sequence
  Description of Artificial Sequence: Synthetic oligonucleotide
agggactacctacttataga

SEQ ID NO: 9105 - DNA, 20 bp, Artificial Sequence
  Description of Artificial Sequence: Synthetic oligonucleotide
gggactacctacttatagaa

SEQ ID NO: 9106 - DNA, 20 bp, Artificial Sequence
  Description of Artificial Sequence: Synthetic oligonucleotide
ggactacctacttatagaat

SEQ ID NO: 9107 - DNA, 20 bp, Artificial Sequence
  Description of Artificial Sequence: Synthetic oligonucleotide
gactacctacttatagaata

SEQ ID NO: 9108 - DNA, 20 bp, Artificial Sequence
  Description of Artificial Sequence: Synthetic oligonucleotide
actacctacttatagaatat

SEQ ID NO: 9109 - DNA, 20 bp, Artificial Sequence
  Description of Artificial Sequence: Synthetic oligonucleotide
ctacctacttatagaatata

SEQ ID NO: 9110 - DNA, 20 bp, Artificial Sequence
  Description of Artificial Sequence: Synthetic oligonucleotide
tacctacttatagaatataa

SEQ ID NO: 9111 - DNA, 20 bp, Artificial Sequence
  Description of Artificial Sequence: Synthetic oligonucleotide
acctacttatagaatataag

SEQ ID NO: 9112 - DNA, 20 bp, Artificial Sequence
  Description of Artificial Sequence: Synthetic oligonucleotide
cctacttatagaatataagg

SEQ ID NO: 9113 - DNA, 20 bp, Artificial Sequence
  Description of Artificial Sequence: Synthetic oligonucleotide
ctacttatagaatataaggg

SEQ ID NO: 9114 - DNA, 20 bp, Artificial Sequence
  Description of Artificial Sequence: Synthetic oligonucleotide
tacttatagaatataagggt

SEQ ID NO: 9115 - DNA, 20 bp, Artificial Sequence
  Description of Artificial Sequence: Synthetic oligonucleotide
acttatagaatataagggta

SEQ ID NO: 9116 - DNA, 20 bp, Artificial Sequence
  Description of Artificial Sequence: Synthetic oligonucleotide
cttatagaatataagggtaa

SEQ ID NO: 9117 - DNA, 20 bp, Artificial Sequence
  Description of Artificial Sequence: Synthetic oligonucleotide
ttatagaatataagggtaac

SEQ ID NO: 9118 - DNA, 20 bp, Artificial Sequence
  Description of Artificial Sequence: Synthetic oligonucleotide
tatagaatataagggtaact

SEQ ID NO: 9119 - DNA, 20 bp, Artificial Sequence
  Description of Artificial Sequence: Synthetic oligonucleotide
atagaatataagggtaactg

SEQ ID NO: 9120 - DNA, 20 bp, Artificial Sequence
  Description of Artificial Sequence: Synthetic oligonucleotide
tagaatataagggtaactga

SEQ ID NO: 9121 - DNA, 20 bp, Artificial Sequence
  Description of Artificial Sequence: Synthetic oligonucleotide
agaatataagggtaactgag

SEQ ID NO: 9122 - DNA, 20 bp, Artificial Sequence
  Description of Artificial Sequence: Synthetic oligonucleotide
gaatataagggtaactgagc

SEQ ID NO: 9123 - DNA, 20 bp, Artificial Sequence
  Description of Artificial Sequence: Synthetic oligonucleotide
aatataagggtaactgagca

SEQ ID NO: 9124 - DNA, 20 bp, Artificial Sequence
  Description of Artificial Sequence: Synthetic oligonucleotide
atataagggtaactgagcac

SEQ ID NO: 9125 - DNA, 20 bp, Artificial Sequence
  Description of Artificial Sequence: Synthetic oligonucleotide
tataagggtaactgagcact

SEQ ID NO: 9126 - DNA, 20 bp, Artificial Sequence
  Description of Artificial Sequence: Synthetic oligonucleotide
ataagggtaactgagcactt

SEQ ID NO: 9127 - DNA, 20 bp, Artificial Sequence
  Description of Artificial Sequence: Synthetic oligonucleotide
taagggtaactgagcacttg

SEQ ID NO: 9128 - DNA, 20 bp, Artificial Sequence
  Description of Artificial Sequence: Synthetic oligonucleotide
aagggtaactgagcacttgg

SEQ ID NO: 9129 - DNA, 20 bp, Artificial Sequence
  Description of Artificial Sequence: Synthetic oligonucleotide
agggtaactgagcacttggt

SEQ ID NO: 9130 - DNA, 20 bp, Artificial Sequence
  Description of Artificial Sequence: Synthetic oligonucleotide
gggtaactgagcacttggtc

SEQ ID NO: 9131 - DNA, 20 bp, Artificial Sequence
  Description of Artificial Sequence: Synthetic oligonucleotide
ggtaactgagcacttggtca

SEQ ID NO: 9132 - DNA, 20 bp, Artificial Sequence
  Description of Artificial Sequence: Synthetic oligonucleotide
gtaactgagcacttggtcat

SEQ ID NO: 9133 - DNA, 20 bp, Artificial Sequence
  Description of Artificial Sequence: Synthetic oligonucleotide
taactgagcacttggtcata

SEQ ID NO: 9134 - DNA, 20 bp, Artificial Sequence
  Description of Artificial Sequence: Synthetic oligonucleotide
aactgagcacttggtcatag

SEQ ID NO: 9135 - DNA, 20 bp, Artificial Sequence
  Description of Artificial Sequence: Synthetic oligonucleotide
actgagcacttggtcataga

SEQ ID NO: 9136 - DNA, 20 bp, Artificial Sequence
  Description of Artificial Sequence: Synthetic oligonucleotide
ctgagcacttggtcatagag

SEQ ID NO: 9137 - DNA, 20 bp, Artificial Sequence
  Description of Artificial Sequence: Synthetic oligonucleotide
tgagcacttggtcatagaga

SEQ ID NO: 9138 - DNA, 20 bp, Artificial Sequence
  Description of Artificial Sequence: Synthetic oligonucleotide
gagcacttggtcatagagaa

SEQ ID NO: 9139 - DNA, 20 bp, Artificial Sequence
  Description of Artificial Sequence: Synthetic oligonucleotide
agcacttggtcatagagaag

SEQ ID NO: 9140 - DNA, 20 bp, Artificial Sequence
  Description of Artificial Sequence: Synthetic oligonucleotide
gcacttggtcatagagaaga

SEQ ID NO: 9141 - DNA, 20 bp, Artificial Sequence
  Description of Artificial Sequence: Synthetic oligonucleotide
cacttggtcatagagaagaa

SEQ ID NO: 9142 - DNA, 20 bp, Artificial Sequence
  Description of Artificial Sequence: Synthetic oligonucleotide
acttggtcatagagaagaaa

SEQ ID NO: 9143 - DNA, 20 bp, Artificial Sequence
  Description of Artificial Sequence: Synthetic oligonucleotide
cttggtcatagagaagaaaa

SEQ ID NO: 9144 - DNA, 20 bp, Artificial Sequence
  Description of Artificial Sequence: Synthetic oligonucleotide
ttggtcatagagaagaaaaa

SEQ ID NO: 9145 - DNA, 20 bp, Artificial Sequence
  Description of Artificial Sequence: Synthetic oligonucleotide
tggtcatagagaagaaaaat

SEQ ID NO: 9146 - DNA, 20 bp, Artificial Sequence
  Description of Artificial Sequence: Synthetic oligonucleotide
ggtcatagagaagaaaaata

SEQ ID NO: 9147 - DNA, 20 bp, Artificial Sequence
  Description of Artificial Sequence: Synthetic oligonucleotide
gtcatagagaagaaaaataa

SEQ ID NO: 9148 - DNA, 20 bp, Artificial Sequence
  Description of Artificial Sequence: Synthetic oligonucleotide
tcatagagaagaaaaataag

SEQ ID NO: 9149 - DNA, 20 bp, Artificial Sequence
  Description of Artificial Sequence: Synthetic oligonucleotide
catagagaagaaaaataagg

SEQ ID NO: 9150 - DNA, 20 bp, Artificial Sequence
  Description of Artificial Sequence: Synthetic oligonucleotide
atagagaagaaaaataagga

SEQ ID NO: 9151 - DNA, 20 bp, Artificial Sequence
  Description of Artificial Sequence: Synthetic oligonucleotide
tagagaagaaaaataaggaa

SEQ ID NO: 9152 - DNA, 20 bp, Artificial Sequence
  Description of Artificial Sequence: Synthetic oligonucleotide
agagaagaaaaataaggaat

SEQ ID NO: 9153 - DNA, 20 bp, Artificial Sequence
  Description of Artificial Sequence: Synthetic oligonucleotide
gagaagaaaaataaggaatg

SEQ ID NO: 9154 - DNA, 20 bp, Artificial Sequence
  Description of Artificial Sequence: Synthetic oligonucleotide
agaagaaaaataaggaatga

SEQ ID NO: 9155 - DNA, 20 bp, Artificial Sequence
  Description of Artificial Sequence: Synthetic oligonucleotide
gaagaaaaataaggaatgat

SEQ ID NO: 9156 - DNA, 20 bp, Artificial Sequence
  Description of Artificial Sequence: Synthetic oligonucleotide
aagaaaaataaggaatgatg

SEQ ID NO: 9157 - DNA, 20 bp, Artificial Sequence
  Description of Artificial Sequence: Synthetic oligonucleotide
agaaaaataaggaatgatgt

SEQ ID NO: 9158 - DNA, 20 bp, Artificial Sequence
  Description of Artificial Sequence: Synthetic oligonucleotide
gaaaaataaggaatgatgtc

SEQ ID NO: 9159 - DNA, 20 bp, Artificial Sequence
  Description of Artificial Sequence: Synthetic oligonucleotide
aaaaataaggaatgatgtcc

SEQ ID NO: 9160 - DNA, 20 bp, Artificial Sequence
  Description of Artificial Sequence: Synthetic oligonucleotide
aaaataaggaatgatgtcct

SEQ ID NO: 9161 - DNA, 20 bp, Artificial Sequence
  Description of Artificial Sequence: Synthetic oligonucleotide
aaataaggaatgatgtcctg

SEQ ID NO: 9162 - DNA, 20 bp, Artificial Sequence
  Description of Artificial Sequence: Synthetic oligonucleotide
aataaggaatgatgtcctgg

SEQ ID NO: 9163 - DNA, 20 bp, Artificial Sequence
  Description of Artificial Sequence: Synthetic oligonucleotide
ataaggaatgatgtcctggg

SEQ ID NO: 9164 - DNA, 20 bp, Artificial Sequence
  Description of Artificial Sequence: Synthetic oligonucleotide
taaggaatgatgtcctgggc

SEQ ID NO: 9165 - DNA, 20 bp, Artificial Sequence
  Description of Artificial Sequence: Synthetic oligonucleotide
aaggaatgatgtcctgggca

SEQ ID NO: 9166 - DNA, 20 bp, Artificial Sequence
  Description of Artificial Sequence: Synthetic oligonucleotide
aggaatgatgtcctgggcaa

SEQ ID NO: 9167 - DNA, 20 bp, Artificial Sequence
  Description of Artificial Sequence: Synthetic oligonucleotide
ggaatgatgtcctgggcaag

SEQ ID NO: 9168 - DNA, 20 bp, Artificial Sequence
  Description of Artificial Sequence: Synthetic oligonucleotide
gaatgatgtcctgggcaaga

SEQ ID NO: 9169 - DNA, 20 bp, Artificial Sequence
  Description of Artificial Sequence: Synthetic oligonucleotide
aatgatgtcctgggcaagaa

SEQ ID NO: 9170 - DNA, 20 bp, Artificial Sequence
  Description of Artificial Sequence: Synthetic oligonucleotide
atgatgtcctgggcaagaag

SEQ ID NO: 9171 - DNA, 20 bp, Artificial Sequence
  Description of Artificial Sequence: Synthetic oligonucleotide
tgatgtcctgggcaagaaga

SEQ ID NO: 9172 - DNA, 20 bp, Artificial Sequence
  Description of Artificial Sequence: Synthetic oligonucleotide
gatgtcctgggcaagaagag

SEQ ID NO: 9173 - DNA, 20 bp, Artificial Sequence
  Description of Artificial Sequence: Synthetic oligonucleotide
atgtcctgggcaagaagagc

SEQ ID NO: 9174 - DNA, 20 bp, Artificial Sequence
  Description of Artificial Sequence: Synthetic oligonucleotide
tgtcctgggcaagaagagca

SEQ ID NO: 9175 - DNA, 20 bp, Artificial Sequence
  Description of Artificial Sequence: Synthetic oligonucleotide
gtcctgggcaagaagagcaa

SEQ ID NO: 9176 - DNA, 20 bp, Artificial Sequence
  Description of Artificial Sequence: Synthetic oligonucleotide
tcctgggcaagaagagcaag

SEQ ID NO: 9177 - DNA, 20 bp, Artificial Sequence
  Description of Artificial Sequence: Synthetic oligonucleotide
cctgggcaagaagagcaaga

SEQ ID NO: 9178 - DNA, 20 bp, Artificial Sequence
  Description of Artificial Sequence: Synthetic oligonucleotide
ctgggcaagaagagcaagag

SEQ ID NO: 9179 - DNA, 20 bp, Artificial Sequence
  Description of Artificial Sequence: Synthetic oligonucleotide
tgggcaagaagagcaagaga

SEQ ID NO: 9180 - DNA, 20 bp, Artificial Sequence
  Description of Artificial Sequence: Synthetic oligonucleotide
gggcaagaagagcaagagac

SEQ ID NO: 9181 - DNA, 20 bp, Artificial Sequence
  Description of Artificial Sequence: Synthetic oligonucleotide
ggcaagaagagcaagagacc

SEQ ID NO: 9182 - DNA, 20 bp, Artificial Sequence
  Description of Artificial Sequence: Synthetic oligonucleotide
gcaagaagagcaagagacct

SEQ ID NO: 9183 - DNA, 20 bp, Artificial Sequence
  Description of Artificial Sequence: Synthetic oligonucleotide
caagaagagcaagagacctg

SEQ ID NO: 9184 - DNA, 20 bp, Artificial Sequence
  Description of Artificial Sequence: Synthetic oligonucleotide
aagaagagcaagagacctgg

SEQ ID NO: 9185 - DNA, 20 bp, Artificial Sequence
  Description of Artificial Sequence: Synthetic oligonucleotide
agaagagcaagagacctggt

SEQ ID NO: 9186 - DNA, 20 bp, Artificial Sequence
  Description of Artificial Sequence: Synthetic oligonucleotide
gaagagcaagagacctggtg

SEQ ID NO: 9187 - DNA, 20 bp, Artificial Sequence
  Description of Artificial Sequence: Synthetic oligonucleotide
aagagcaagagacctggtgg

SEQ ID NO: 9188 - DNA, 20 bp, Artificial Sequence
  Description of Artificial Sequence: Synthetic oligonucleotide
agagcaagagacctggtggg

SEQ ID NO: 9189 - DNA, 20 bp, Artificial Sequence
  Description of Artificial Sequence: Synthetic oligonucleotide
gagcaagagacctggtggga

SEQ ID NO: 9190 - DNA, 20 bp, Artificial Sequence
  Description of Artificial Sequence: Synthetic oligonucleotide
agcaagagacctggtgggag

SEQ ID NO: 9191 - DNA, 20 bp, Artificial Sequence
  Description of Artificial Sequence: Synthetic oligonucleotide
gcaagagacctggtgggaga

SEQ ID NO: 9192 - DNA, 20 bp, Artificial Sequence
  Description of Artificial Sequence: Synthetic oligonucleotide
caagagacctggtgggagag

SEQ ID NO: 9193 - DNA, 20 bp, Artificial Sequence
  Description of Artificial Sequence: Synthetic oligonucleotide
aagagacctggtgggagagc

SEQ ID NO: 9194 - DNA, 20 bp, Artificial Sequence
  Description of Artificial Sequence: Synthetic oligonucleotide
agagacctggtgggagagct

SEQ ID NO: 9195 - DNA, 20 bp, Artificial Sequence
  Description of Artificial Sequence: Synthetic oligonucleotide
gagacctggtgggagagctg

SEQ ID NO: 9196 - DNA, 20 bp, Artificial Sequence
  Description of Artificial Sequence: Synthetic oligonucleotide
agacctggtgggagagctgc

SEQ ID NO: 9197 - DNA, 20 bp, Artificial Sequence
  Description of Artificial Sequence: Synthetic oligonucleotide
gacctggtgggagagctgca

SEQ ID NO: 9198 - DNA, 20 bp, Artificial Sequence
  Description of Artificial Sequence: Synthetic oligonucleotide
acctggtgggagagctgcac

SEQ ID NO: 9199 - DNA, 20 bp, Artificial Sequence
  Description of Artificial Sequence: Synthetic oligonucleotide
cctggtgggagagctgcact

SEQ ID NO: 9200 - DNA, 20 bp, Artificial Sequence
  Description of Artificial Sequence: Synthetic oligonucleotide
ctggtgggagagctgcactt

SEQ ID NO: 9201 - DNA, 20 bp, Artificial Sequence
  Description of Artificial Sequence: Synthetic oligonucleotide
tggtgggagagctgcacttg

SEQ ID NO: 9202 - DNA, 20 bp, Artificial Sequence
  Description of Artificial Sequence: Synthetic oligonucleotide
ggtgggagagctgcacttga

SEQ ID NO: 9203 - DNA, 20 bp, Artificial Sequence
  Description of Artificial Sequence: Synthetic oligonucleotide
gtgggagagctgcacttgac

SEQ ID NO: 9204 - DNA, 20 bp, Artificial Sequence
  Description of Artificial Sequence: Synthetic oligonucleotide
tgggagagctgcacttgacc

SEQ ID NO: 9205 - DNA, 20 bp, Artificial Sequence
  Description of Artificial Sequence: Synthetic oligonucleotide
gggagagctgcacttgaccc

SEQ ID NO: 9206 - DNA, 20 bp, Artificial Sequence
  Description of Artificial Sequence: Synthetic oligonucleotide
ggagagctgcacttgacccc

SEQ ID NO: 9207 - DNA, 20 bp, Artificial Sequence
  Description of Artificial Sequence: Synthetic oligonucleotide
gagagctgcacttgacccca

SEQ ID NO: 9208 - DNA, 20 bp, Artificial Sequence
  Description of Artificial Sequence: Synthetic oligonucleotide
agagctgcacttgaccccaa

SEQ ID NO: 9209 - DNA, 20 bp, Artificial Sequence
  Description of Artificial Sequence: Synthetic oligonucleotide
gagctgcacttgaccccaag

SEQ ID NO: 9210 - DNA, 20 bp, Artificial Sequence
  Description of Artificial Sequence: Synthetic oligonucleotide
agctgcacttgaccccaaga

SEQ ID NO: 9211 - DNA, 20 bp, Artificial Sequence
  Description of Artificial Sequence: Synthetic oligonucleotide
gctgcacttgaccccaagaa

SEQ ID NO: 9212 - DNA, 20 bp, Artificial Sequence
  Description of Artificial Sequence: Synthetic oligonucleotide
ctgcacttgaccccaagaac

SEQ ID NO: 9213 - DNA, 20 bp, Artificial Sequence
  Description of Artificial Sequence: Synthetic oligonucleotide
tgcacttgaccccaagaacc

SEQ ID NO: 9214 - DNA, 20 bp, Artificial Sequence
  Description of Artificial Sequence: Synthetic oligonucleotide
gcacttgaccccaagaacct

SEQ ID NO: 9215 - DNA, 20 bp, Artificial Sequence
  Description of Artificial Sequence: Synthetic oligonucleotide
cacttgaccccaagaacctc

SEQ ID NO: 9216 - DNA, 20 bp, Artificial Sequence
  Description of Artificial Sequence: Synthetic oligonucleotide
acttgaccccaagaacctcc

SEQ ID NO: 9217 - DNA, 20 bp, Artificial Sequence
  Description of Artificial Sequence: Synthetic oligonucleotide
cttgaccccaagaacctcct

SEQ ID NO: 9218 - DNA, 20 bp, Artificial Sequence
  Description of Artificial Sequence: Synthetic oligonucleotide
ttgaccccaagaacctcctt

SEQ ID NO: 9219 - DNA, 20 bp, Artificial Sequence
  Description of Artificial Sequence: Synthetic oligonucleotide
tgaccccaagaacctccttg

SEQ ID NO: 9220 - DNA, 20 bp, Artificial Sequence
  Description of Artificial Sequence: Synthetic oligonucleotide
gaccccaagaacctccttgc

SEQ ID NO: 9221 - DNA, 20 bp, Artificial Sequence
  Description of Artificial Sequence: Synthetic oligonucleotide
accccaagaacctccttgca

SEQ ID NO: 9222 - DNA, 20 bp, Artificial Sequence
  Description of Artificial Sequence: Synthetic oligonucleotide
ccccaagaacctccttgcag

SEQ ID NO: 9223 - DNA, 20 bp, Artificial Sequence
  Description of Artificial Sequence: Synthetic oligonucleotide
cccaagaacctccttgcagg

SEQ ID NO: 9224 - DNA, 20 bp, Artificial Sequence
  Description of Artificial Sequence: Synthetic oligonucleotide
ccaagaacctccttgcagga

SEQ ID NO: 9225 - DNA, 20 bp, Artificial Sequence
  Description of Artificial Sequence: Synthetic oligonucleotide
caagaacctccttgcaggat

SEQ ID NO: 9226 - DNA, 20 bp, Artificial Sequence
  Description of Artificial Sequence: Synthetic oligonucleotide
aagaacctccttgcaggatg

SEQ ID NO: 9227 - DNA, 20 bp, Artificial Sequence
  Description of Artificial Sequence: Synthetic oligonucleotide
agaacctccttgcaggatgg

SEQ ID NO: 9228 - DNA, 20 bp, Artificial Sequence
  Description of Artificial Sequence: Synthetic oligonucleotide
gaacctccttgcaggatggt

SEQ ID NO: 9229 - DNA, 20 bp, Artificial Sequence
  Description of Artificial Sequence: Synthetic oligonucleotide
aacctccttgcaggatggtg

SEQ ID NO: 9230 - DNA, 20 bp, Artificial Sequence
  Description of Artificial Sequence: Synthetic oligonucleotide
acctccttgcaggatggtga

SEQ ID NO: 9231 - DNA, 20 bp, Artificial Sequence
  Description of Artificial Sequence: Synthetic oligonucleotide
cctccttgcaggatggtgag

SEQ ID NO: 9232 - DNA, 20 bp, Artificial Sequence
  Description of Artificial Sequence: Synthetic oligonucleotide
ctccttgcaggatggtgaga

SEQ ID NO: 9233 - DNA, 20 bp, Artificial Sequence
  Description of Artificial Sequence: Synthetic oligonucleotide
tccttgcaggatggtgagaa

SEQ ID NO: 9234 - DNA, 20 bp, Artificial Sequence
  Description of Artificial Sequence: Synthetic oligonucleotide
ccttgcaggatggtgagaaa

SEQ ID NO: 9235 - DNA, 20 bp, Artificial Sequence
  Description of Artificial Sequence: Synthetic oligonucleotide
cttgcaggatggtgagaaag

SEQ ID NO: 9236 - DNA, 20 bp, Artificial Sequence
  Description of Artificial Sequence: Synthetic oligonucleotide
ttgcaggatggtgagaaagc

SEQ ID NO: 9237 - DNA, 20 bp, Artificial Sequence
  Description of Artificial Sequence: Synthetic oligonucleotide
tgcaggatggtgagaaagcc

SEQ ID NO: 9238 - DNA, 20 bp, Artificial Sequence
  Description of Artificial Sequence: Synthetic oligonucleotide
gcaggatggtgagaaagcct

SEQ ID NO: 9239 - DNA, 20 bp, Artificial Sequence
  Description of Artificial Sequence: Synthetic oligonucleotide
caggatggtgagaaagcctc

SEQ ID NO: 9240 - DNA, 20 bp, Artificial Sequence
  Description of Artificial Sequence: Synthetic oligonucleotide
aggatggtgagaaagcctcc

SEQ ID NO: 9241 - DNA, 20 bp, Artificial Sequence
  Description of Artificial Sequence: Synthetic oligonucleotide
ggatggtgagaaagcctcct

SEQ ID NO: 9242 - DNA, 20 bp, Artificial Sequence
  Description of Artificial Sequence: Synthetic oligonucleotide
gatggtgagaaagcctcctg

SEQ ID NO: 9243 - DNA, 20 bp, Artificial Sequence
  Description of Artificial Sequence: Synthetic oligonucleotide
atggtgagaaagcctcctgt

SEQ ID NO: 9244 - DNA, 20 bp, Artificial Sequence
  Description of Artificial Sequence: Synthetic oligonucleotide
tggtgagaaagcctcctgtt

SEQ ID NO: 9245 - DNA, 20 bp, Artificial Sequence
  Description of Artificial Sequence: Synthetic oligonucleotide
ggtgagaaagcctcctgttt

SEQ ID NO: 9246 - DNA, 20 bp, Artificial Sequence
  Description of Artificial Sequence: Synthetic oligonucleotide
gtgagaaagcctcctgtttg

SEQ ID NO: 9247 - DNA, 20 bp, Artificial Sequence
  Description of Artificial Sequence: Synthetic oligonucleotide
tgagaaagcctcctgtttgg

SEQ ID NO: 9248 - DNA, 20 bp, Artificial Sequence
  Description of Artificial Sequence: Synthetic oligonucleotide
gagaaagcctcctgtttgga

SEQ ID NO: 9249 - DNA, 20 bp, Artificial Sequence
  Description of Artificial Sequence: Synthetic oligonucleotide
agaaagcctcctgtttggat

SEQ ID NO: 9250 - DNA, 20 bp, Artificial Sequence
  Description of Artificial Sequence: Synthetic oligonucleotide
gaaagcctcctgtttggatg

SEQ ID NO: 9251 - DNA, 20 bp, Artificial Sequence
  Description of Artificial Sequence: Synthetic oligonucleotide
aaagcctcctgtttggatga

SEQ ID NO: 9252 - DNA, 20 bp, Artificial Sequence
  Description of Artificial Sequence: Synthetic oligonucleotide
aagcctcctgtttggatgag

SEQ ID NO: 9253 - DNA, 20 bp, Artificial Sequence
  Description of Artificial Sequence: Synthetic oligonucleotide
agcctcctgtttggatgagc

SEQ ID NO: 9254 - DNA, 20 bp, Artificial Sequence
  Description of Artificial Sequence: Synthetic oligonucleotide
gcctcctgtttggatgagca

SEQ ID NO: 9255 - DNA, 20 bp, Artificial Sequence
  Description of Artificial Sequence: Synthetic oligonucleotide
cctcctgtttggatgagcag

SEQ ID NO: 9256 - DNA, 20 bp, Artificial Sequence
  Description of Artificial Sequence: Synthetic oligonucleotide
ctcctgtttggatgagcagg

SEQ ID NO: 9257 - DNA, 20 bp, Artificial Sequence
  Description of Artificial Sequence: Synthetic oligonucleotide
tcctgtttggatgagcagga

SEQ ID NO: 9258 - DNA, 20 bp, Artificial Sequence
  Description of Artificial Sequence: Synthetic oligonucleotide
cctgtttggatgagcaggaa

SEQ ID NO: 9259 - DNA, 20 bp, Artificial Sequence
  Description of Artificial Sequence: Synthetic oligonucleotide
ctgtttggatgagcaggaag

SEQ ID NO: 9260 - DNA, 20 bp, Artificial Sequence
  Description of Artificial Sequence: Synthetic oligonucleotide
tgtttggatgagcaggaagt

SEQ ID NO: 9261 - DNA, 20 bp, Artificial Sequence
  Description of Artificial Sequence: Synthetic oligonucleotide
gtttggatgagcaggaagtg

SEQ ID NO: 9262 - DNA, 20 bp, Artificial Sequence
  Description of Artificial Sequence: Synthetic oligonucleotide
tttggatgagcaggaagtgg

SEQ ID NO: 9263 - DNA, 20 bp, Artificial Sequence
  Description of Artificial Sequence: Synthetic oligonucleotide
ttggatgagcaggaagtggc

SEQ ID NO: 9264 - DNA, 20 bp, Artificial Sequence
  Description of Artificial Sequence: Synthetic oligonucleotide
tggatgagcaggaagtggca

SEQ ID NO: 9265 - DNA, 20 bp, Artificial Sequence
  Description of Artificial Sequence: Synthetic oligonucleotide
ggatgagcaggaagtggcac

SEQ ID NO: 9266 - DNA, 20 bp, Artificial Sequence
  Description of Artificial Sequence: Synthetic oligonucleotide
gatgagcaggaagtggcacg

SEQ ID NO: 9267 - DNA, 20 bp, Artificial Sequence
  Description of Artificial Sequence: Synthetic oligonucleotide
atgagcaggaagtggcacgg

SEQ ID NO: 9268 - DNA, 20 bp, Artificial Sequence
  Description of Artificial Sequence: Synthetic oligonucleotide
tgagcaggaagtggcacggt

SEQ ID NO: 9269 - DNA, 20 bp, Artificial Sequence
  Description of Artificial Sequence: Synthetic oligonucleotide
gagcaggaagtggcacggtc

SEQ ID NO: 9270 - DNA, 20 bp, Artificial Sequence
  Description of Artificial Sequence: Synthetic oligonucleotide
agcaggaagtggcacggtca

SEQ ID NO: 9271 - DNA, 20 bp, Artificial Sequence
  Description of Artificial Sequence: Synthetic oligonucleotide
gcaggaagtggcacggtcag

SEQ ID NO: 9272 - DNA, 20 bp, Artificial Sequence
  Description of Artificial Sequence: Synthetic oligonucleotide
caggaagtggcacggtcaga

SEQ ID NO: 9273 - DNA, 20 bp, Artificial Sequence
  Description of Artificial Sequence: Synthetic oligonucleotide
aggaagtggcacggtcagat

SEQ ID NO: 9274 - DNA, 20 bp, Artificial Sequence
  Description of Artificial Sequence: Synthetic oligonucleotide
ggaagtggcacggtcagatt

SEQ ID NO: 9275 - DNA, 20 bp, Artificial Sequence
  Description of Artificial Sequence: Synthetic oligonucleotide
gaagtggcacggtcagattc

SEQ ID NO: 9276 - DNA, 20 bp, Artificial Sequence
  Description of Artificial Sequence: Synthetic oligonucleotide
aagtggcacggtcagattcc

SEQ ID NO: 9277 - DNA, 20 bp, Artificial Sequence
  Description of Artificial Sequence: Synthetic oligonucleotide
agtggcacggtcagattcct

SEQ ID NO: 9278 - DNA, 20 bp, Artificial Sequence
  Description of Artificial Sequence: Synthetic oligonucleotide
gtggcacggtcagattcctc

SEQ ID NO: 9279 - DNA, 20 bp, Artificial Sequence
  Description of Artificial Sequence: Synthetic oligonucleotide
tggcacggtcagattcctct

SEQ ID NO: 9280 - DNA, 20 bp, Artificial Sequence
  Description of Artificial Sequence: Synthetic oligonucleotide
ggcacggtcagattcctctg

SEQ ID NO: 9281 - DNA, 20 bp, Artificial Sequence
  Description of Artificial Sequence: Synthetic oligonucleotide
gcacggtcagattcctctgt

SEQ ID NO: 9282 - DNA, 20 bp, Artificial Sequence
  Description of Artificial Sequence: Synthetic oligonucleotide
cacggtcagattcctctgtc

SEQ ID NO: 9283 - DNA, 20 bp, Artificial Sequence
  Description of Artificial Sequence: Synthetic oligonucleotide
acggtcagattcctctgtct

SEQ ID NO: 9284 - DNA, 20 bp, Artificial Sequence
  Description of Artificial Sequence: Synthetic oligonucleotide
cggtcagattcctctgtctg

SEQ ID NO: 9285 - DNA, 20 bp, Artificial Sequence
  Description of Artificial Sequence: Synthetic oligonucleotide
ggtcagattcctctgtctgg

SEQ ID NO: 9286 - DNA, 20 bp, Artificial Sequence
  Description of Artificial Sequence: Synthetic oligonucleotide
gtcagattcctctgtctggc

SEQ ID NO: 9287 - DNA, 20 bp, Artificial Sequence
  Description of Artificial Sequence: Synthetic oligonucleotide
tcagattcctctgtctggcc

SEQ ID NO: 9288 - DNA, 20 bp, Artificial Sequence
  Description of Artificial Sequence: Synthetic oligonucleotide
cagattcctctgtctggcct

SEQ ID NO: 9289 - DNA, 20 bp, Artificial Sequence
  Description of Artificial Sequence: Synthetic oligonucleotide
agattcctctgtctggcctg

SEQ ID NO: 9290 - DNA, 20 bp, Artificial Sequence
  Description of Artificial Sequence: Synthetic oligonucleotide
gattcctctgtctggcctgg

SEQ ID NO: 9291 - DNA, 20 bp, Artificial Sequence
  Description of Artificial Sequence: Synthetic oligonucleotide
attcctctgtctggcctggt

SEQ ID NO: 9292 - DNA, 20 bp, Artificial Sequence
  Description of Artificial Sequence: Synthetic oligonucleotide
ttcctctgtctggcctggtc

SEQ ID NO: 9293 - DNA, 20 bp, Artificial Sequence
  Description of Artificial Sequence: Synthetic oligonucleotide
tcctctgtctggcctggtct

SEQ ID NO: 9294 - DNA, 20 bp, Artificial Sequence
  Description of Artificial Sequence: Synthetic oligonucleotide
cctctgtctggcctggtctt

SEQ ID NO: 9295 - DNA, 20 bp, Artificial Sequence
  Description of Artificial Sequence: Synthetic oligonucleotide
ctctgtctggcctggtcttc

SEQ ID NO: 9296 - DNA, 20 bp, Artificial Sequence
  Description of Artificial Sequence: Synthetic oligonucleotide
tctgtctggcctggtcttcc

SEQ ID NO: 9297 - DNA, 20 bp, Artificial Sequence
  Description of Artificial Sequence: Synthetic oligonucleotide
ctgtctggcctggtcttccg

SEQ ID NO: 9298 - DNA, 20 bp, Artificial Sequence
  Description of Artificial Sequence: Synthetic oligonucleotide
tgtctggcctggtcttccgc

SEQ ID NO: 9299 - DNA, 20 bp, Artificial Sequence
  Description of Artificial Sequence: Synthetic oligonucleotide
gtctggcctggtcttccgca

SEQ ID NO: 9300 - DNA, 20 bp, Artificial Sequence
  Description of Artificial Sequence: Synthetic oligonucleotide
tctggcctggtcttccgcat

SEQ ID NO: 9301 - DNA, 20 bp, Artificial Sequence
  Description of Artificial Sequence: Synthetic oligonucleotide
ctggcctggtcttccgcatg

SEQ ID NO: 9302 - DNA, 20 bp, Artificial Sequence
  Description of Artificial Sequence: Synthetic oligonucleotide
tggcctggtcttccgcatgt

SEQ ID NO: 9303 - DNA, 20 bp, Artificial Sequence
  Description of Artificial Sequence: Synthetic oligonucleotide
ggcctggtcttccgcatgtc

SEQ ID NO: 9304 - DNA, 20 bp, Artificial Sequence
  Description of Artificial Sequence: Synthetic oligonucleotide
gcctggtcttccgcatgtct

SEQ ID NO: 9305 - DNA, 20 bp, Artificial Sequence
  Description of Artificial Sequence: Synthetic oligonucleotide
cctggtcttccgcatgtctg

SEQ ID NO: 9306 - DNA, 20 bp, Artificial Sequence
  Description of Artificial Sequence: Synthetic oligonucleotide
ctggtcttccgcatgtctgg

SEQ ID NO: 9307 - DNA, 20 bp, Artificial Sequence
  Description of Artificial Sequence: Synthetic oligonucleotide
tggtcttccgcatgtctggt

SEQ ID NO: 9308 - DNA, 20 bp, Artificial Sequence
  Description of Artificial Sequence: Synthetic oligonucleotide
ggtcttccgcatgtctggtt

SEQ ID NO: 9309 - DNA, 20 bp, Artificial Sequence
  Description of Artificial Sequence: Synthetic oligonucleotide
gtcttccgcatgtctggttt

SEQ ID NO: 9310 - DNA, 20 bp, Artificial Sequence
  Description of Artificial Sequence: Synthetic oligonucleotide
tcttccgcatgtctggtttc

SEQ ID NO: 9311 - DNA, 20 bp, Artificial Sequence
  Description of Artificial Sequence: Synthetic oligonucleotide
cttccgcatgtctggtttca

SEQ ID NO: 9312 - DNA, 20 bp, Artificial Sequence
  Description of Artificial Sequence: Synthetic oligonucleotide
ttccgcatgtctggtttcat

SEQ ID NO: 9313 - DNA, 20 bp, Artificial Sequence
  Description of Artificial Sequence: Synthetic oligonucleotide
tccgcatgtctggtttcatc

SEQ ID NO: 9314 - DNA, 20 bp, Artificial Sequence
  Description of Artificial Sequence: Synthetic oligonucleotide
ccgcatgtctggtttcatct

SEQ ID NO: 9315 - DNA, 20 bp, Artificial Sequence
  Description of Artificial Sequence: Synthetic oligonucleotide
cgcatgtctggtttcatctc

SEQ ID NO: 9316 - DNA, 20 bp, Artificial Sequence
  Description of Artificial Sequence: Synthetic oligonucleotide
gcatgtctggtttcatctca

SEQ ID NO: 9317 - DNA, 20 bp, Artificial Sequence
  Description of Artificial Sequence: Synthetic oligonucleotide
catgtctggtttcatctcac

SEQ ID NO: 9318 - DNA, 20 bp, Artificial Sequence
  Description of Artificial Sequence: Synthetic oligonucleotide
atgtctggtttcatctcaca

SEQ ID NO: 9319 - DNA, 20 bp, Artificial Sequence
  Description of Artificial Sequence: Synthetic oligonucleotide
tgtctggtttcatctcacag

SEQ ID NO: 9320 - DNA, 20 bp, Artificial Sequence
  Description of Artificial Sequence: Synthetic oligonucleotide
gtctggtttcatctcacaga

SEQ ID NO: 9321 - DNA, 20 bp, Artificial Sequence
  Description of Artificial Sequence: Synthetic oligonucleotide
tctggtttcatctcacagac

SEQ ID NO: 9322 - DNA, 20 bp, Artificial Sequence
  Description of Artificial Sequence: Synthetic oligonucleotide
ctggtttcatctcacagacc

SEQ ID NO: 9323 - DNA, 20 bp, Artificial Sequence
  Description of Artificial Sequence: Synthetic oligonucleotide
tggtttcatctcacagacca

SEQ ID NO: 9324 - DNA, 20 bp, Artificial Sequence
  Description of Artificial Sequence: Synthetic oligonucleotide
ggtttcatctcacagaccaa

SEQ ID NO: 9325 - DNA, 20 bp, Artificial Sequence
  Description of Artificial Sequence: Synthetic oligonucleotide
gtttcatctcacagaccaaa

SEQ ID NO: 9326 - DNA, 20 bp, Artificial Sequence
  Description of Artificial Sequence: Synthetic oligonucleotide
tttcatctcacagaccaaat

SEQ ID NO: 9327 - DNA, 20 bp, Artificial Sequence
  Description of Artificial Sequence: Synthetic oligonucleotide
ttcatctcacagaccaaatc

SEQ ID NO: 9328 - DNA, 20 bp, Artificial Sequence
  Description of Artificial Sequence: Synthetic oligonucleotide
tcatctcacagaccaaatca

SEQ ID NO: 9329 - DNA, 20 bp, Artificial Sequence
  Description of Artificial Sequence: Synthetic oligonucleotide
catctcacagaccaaatcag

SEQ ID NO: 9330 - DNA, 20 bp, Artificial Sequence
  Description of Artificial Sequence: Synthetic oligonucleotide
atctcacagaccaaatcagg

SEQ ID NO: 9331 - DNA, 20 bp, Artificial Sequence
  Description of Artificial Sequence: Synthetic oligonucleotide
tctcacagaccaaatcagga

SEQ ID NO: 9332 - DNA, 20 bp, Artificial Sequence
  Description of Artificial Sequence: Synthetic oligonucleotide
ctcacagaccaaatcaggac

SEQ ID NO: 9333 - DNA, 20 bp, Artificial Sequence
  Description of Artificial Sequence: Synthetic oligonucleotide
tcacagaccaaatcaggact

SEQ ID NO: 9334 - DNA, 20 bp, Artificial Sequence
  Description of Artificial Sequence: Synthetic oligonucleotide
cacagaccaaatcaggactc

SEQ ID NO: 9335 - DNA, 20 bp, Artificial Sequence
  Description of Artificial Sequence: Synthetic oligonucleotide
acagaccaaatcaggactca

SEQ ID NO: 9336 - DNA, 20 bp, Artificial Sequence
  Description of Artificial Sequence: Synthetic oligonucleotide
cagaccaaatcaggactcac

SEQ ID NO: 9337 - DNA, 20 bp, Artificial Sequence
  Description of Artificial Sequence: Synthetic oligonucleotide
agaccaaatcaggactcact

SEQ ID NO: 9338 - DNA, 20 bp, Artificial Sequence
  Description of Artificial Sequence: Synthetic oligonucleotide
gaccaaatcaggactcactt

SEQ ID NO: 9339 - DNA, 20 bp, Artificial Sequence
  Description of Artificial Sequence: Synthetic oligonucleotide
accaaatcaggactcacttg

SEQ ID NO: 9340 - DNA, 20 bp, Artificial Sequence
  Description of Artificial Sequence: Synthetic oligonucleotide
ccaaatcaggactcacttgt

SEQ ID NO: 9341 - DNA, 20 bp, Artificial Sequence
  Description of Artificial Sequence: Synthetic oligonucleotide
caaatcaggactcacttgtc

SEQ ID NO: 9342 - DNA, 20 bp, Artificial Sequence
  Description of Artificial Sequence: Synthetic oligonucleotide
aaatcaggactcacttgtct

SEQ ID NO: 9343 - DNA, 20 bp, Artificial Sequence
  Description of Artificial Sequence: Synthetic oligonucleotide
aatcaggactcacttgtctg

SEQ ID NO: 9344 - DNA, 20 bp, Artificial Sequence
  Description of Artificial Sequence: Synthetic oligonucleotide
atcaggactcacttgtctgg

SEQ ID NO: 9345 - DNA, 20 bp, Artificial Sequence
  Description of Artificial Sequence: Synthetic oligonucleotide
tcaggactcacttgtctgga

SEQ ID NO: 9346 - DNA, 20 bp, Artificial Sequence
  Description of Artificial Sequence: Synthetic oligonucleotide
caggactcacttgtctggaa

SEQ ID NO: 9347 - DNA, 20 bp, Artificial Sequence
  Description of Artificial Sequence: Synthetic oligonucleotide
aggactcacttgtctggaaa

SEQ ID NO: 9348 - DNA, 20 bp, Artificial Sequence
  Description of Artificial Sequence: Synthetic oligonucleotide
ggactcacttgtctggaaaa

SEQ ID NO: 9349 - DNA, 20 bp, Artificial Sequence
  Description of Artificial Sequence: Synthetic oligonucleotide
gactcacttgtctggaaaat

SEQ ID NO: 9350 - DNA, 20 bp, Artificial Sequence
  Description of Artificial Sequence: Synthetic oligonucleotide
actcacttgtctggaaaatg

SEQ ID NO: 9351 - DNA, 20 bp, Artificial Sequence
  Description of Artificial Sequence: Synthetic oligonucleotide
ctcacttgtctggaaaatgg

SEQ ID NO: 9352 - DNA, 20 bp, Artificial Sequence
  Description of Artificial Sequence: Synthetic oligonucleotide
tcacttgtctggaaaatggc

SEQ ID NO: 9353 - DNA, 20 bp, Artificial Sequence
  Description of Artificial Sequence: Synthetic oligonucleotide
cacttgtctggaaaatggcc

SEQ ID NO: 9354 - DNA, 20 bp, Artificial Sequence
  Description of Artificial Sequence: Synthetic oligonucleotide
acttgtctggaaaatggcct

SEQ ID NO: 9355 - DNA, 20 bp, Artificial Sequence
  Description of Artificial Sequence: Synthetic oligonucleotide
cttgtctggaaaatggcctg

SEQ ID NO: 9356 - DNA, 20 bp, Artificial Sequence
  Description of Artificial Sequence: Synthetic oligonucleotide
ttgtctggaaaatggcctga

SEQ ID NO: 9357 - DNA, 20 bp, Artificial Sequence
  Description of Artificial Sequence: Synthetic oligonucleotide
tgtctggaaaatggcctgag

SEQ ID NO: 9358 - DNA, 20 bp, Artificial Sequence
  Description of Artificial Sequence: Synthetic oligonucleotide
gtctggaaaatggcctgaga

SEQ ID NO: 9359 - DNA, 20 bp, Artificial Sequence
  Description of Artificial Sequence: Synthetic oligonucleotide
tctggaaaatggcctgagaa

SEQ ID NO: 9360 - DNA, 20 bp, Artificial Sequence
  Description of Artificial Sequence: Synthetic oligonucleotide
ctggaaaatggcctgagaat

SEQ ID NO: 9361 - DNA, 20 bp, Artificial Sequence
  Description of Artificial Sequence: Synthetic oligonucleotide
tggaaaatggcctgagaata

SEQ ID NO: 9362 - DNA, 20 bp, Artificial Sequence
  Description of Artificial Sequence: Synthetic oligonucleotide
ggaaaatggcctgagaatac

SEQ ID NO: 9363 - DNA, 20 bp, Artificial Sequence
  Description of Artificial Sequence: Synthetic oligonucleotide
gaaaatggcctgagaatacc

SEQ ID NO: 9364 - DNA, 20 bp, Artificial Sequence
  Description of Artificial Sequence: Synthetic oligonucleotide
aaaatggcctgagaatacct

SEQ ID NO: 9365 - DNA, 20 bp, Artificial Sequence
  Description of Artificial Sequence: Synthetic oligonucleotide
aaatggcctgagaatacctt

SEQ ID NO: 9366 - DNA, 20 bp, Artificial Sequence
  Description of Artificial Sequence: Synthetic oligonucleotide
aatggcctgagaataccttt

SEQ ID NO: 9367 - DNA, 20 bp, Artificial Sequence
  Description of Artificial Sequence: Synthetic oligonucleotide
atggcctgagaatacctttc

SEQ ID NO: 9368 - DNA, 20 bp, Artificial Sequence
  Description of Artificial Sequence: Synthetic oligonucleotide
tggcctgagaatacctttct

SEQ ID NO: 9369 - DNA, 20 bp, Artificial Sequence
  Description of Artificial Sequence: Synthetic oligonucleotide
ggcctgagaatacctttcta

SEQ ID NO: 9370 - DNA, 20 bp, Artificial Sequence
  Description of Artificial Sequence: Synthetic oligonucleotide
gcctgagaatacctttctaa

SEQ ID NO: 9371 - DNA, 20 bp, Artificial Sequence
  Description of Artificial Sequence: Synthetic oligonucleotide
cctgagaatacctttctaat

SEQ ID NO: 9372 - DNA, 20 bp, Artificial Sequence
  Description of Artificial Sequence: Synthetic oligonucleotide
ctgagaatacctttctaatc

SEQ ID NO: 9373 - DNA, 20 bp, Artificial Sequence
  Description of Artificial Sequence: Synthetic oligonucleotide
tgagaatacctttctaatcc

SEQ ID NO: 9374 - DNA, 20 bp, Artificial Sequence
  Description of Artificial Sequence: Synthetic oligonucleotide
gagaatacctttctaatccc

SEQ ID NO: 9375 - DNA, 20 bp, Artificial Sequence
  Description of Artificial Sequence: Synthetic oligonucleotide
agaatacctttctaatccca

SEQ ID NO: 9376 - DNA, 20 bp, Artificial Sequence
  Description of Artificial Sequence: Synthetic oligonucleotide
gaatacctttctaatcccaa

SEQ ID NO: 9377 - DNA, 20 bp, Artificial Sequence
  Description of Artificial Sequence: Synthetic oligonucleotide
aatacctttctaatcccaaa

SEQ ID NO: 9378 - DNA, 20 bp, Artificial Sequence
  Description of Artificial Sequence: Synthetic oligonucleotide
atacctttctaatcccaaac

SEQ ID NO: 9379 - DNA, 20 bp, Artificial Sequence
  Description of Artificial Sequence: Synthetic oligonucleotide
tacctttctaatcccaaact

SEQ ID NO: 9380 - DNA, 20 bp, Artificial Sequence
  Description of Artificial Sequence: Synthetic oligonucleotide
acctttctaatcccaaactg

SEQ ID NO: 9381 - DNA, 20 bp, Artificial Sequence
  Description of Artificial Sequence: Synthetic oligonucleotide
cctttctaatcccaaactga

SEQ ID NO: 9382 - DNA, 20 bp, Artificial Sequence
  Description of Artificial Sequence: Synthetic oligonucleotide
ctttctaatcccaaactgag

SEQ ID NO: 9383 - DNA, 20 bp, Artificial Sequence
  Description of Artificial Sequence: Synthetic oligonucleotide
tttctaatcccaaactgagg

SEQ ID NO: 9384 - DNA, 20 bp, Artificial Sequence
  Description of Artificial Sequence: Synthetic oligonucleotide
ttctaatcccaaactgaggg

SEQ ID NO: 9385 - DNA, 20 bp, Artificial Sequence
  Description of Artificial Sequence: Synthetic oligonucleotide
tctaatcccaaactgagggc

SEQ ID NO: 9386 - DNA, 20 bp, Artificial Sequence
  Description of Artificial Sequence: Synthetic oligonucleotide
ctaatcccaaactgagggcc

SEQ ID NO: 9387 - DNA, 20 bp, Artificial Sequence
  Description of Artificial Sequence: Synthetic oligonucleotide
taatcccaaactgagggccc

SEQ ID NO: 9388 - DNA, 20 bp, Artificial Sequence
  Description of Artificial Sequence: Synthetic oligonucleotide
aatcccaaactgagggcccg

SEQ ID NO: 9389 - DNA, 20 bp, Artificial Sequence
  Description of Artificial Sequence: Synthetic oligonucleotide
atcccaaactgagggcccgg

SEQ ID NO: 9390 - DNA, 20 bp, Artificial Sequence
  Description of Artificial Sequence: Synthetic oligonucleotide
tcccaaactgagggcccgga

SEQ ID NO: 9391 - DNA, 20 bp, Artificial Sequence
  Description of Artificial Sequence: Synthetic oligonucleotide
cccaaactgagggcccggaa

SEQ ID NO: 9392 - DNA, 20 bp, Artificial Sequence
  Description of Artificial Sequence: Synthetic oligonucleotide
ccaaactgagggcccggaag

SEQ ID NO: 9393 - DNA, 20 bp, Artificial Sequence
  Description of Artificial Sequence: Synthetic oligonucleotide
caaactgagggcccggaagt

SEQ ID NO: 9394 - DNA, 20 bp, Artificial Sequence
  Description of Artificial Sequence: Synthetic oligonucleotide
aaactgagggcccggaagtc

SEQ ID NO: 9395 - DNA, 20 bp, Artificial Sequence
  Description of Artificial Sequence: Synthetic oligonucleotide
aactgagggcccggaagtcc

SEQ ID NO: 9396 - DNA, 20 bp, Artificial Sequence
  Description of Artificial Sequence: Synthetic oligonucleotide
actgagggcccggaagtcca

SEQ ID NO: 9397 - DNA, 20 bp, Artificial Sequence
  Description of Artificial Sequence: Synthetic oligonucleotide
ctgagggcccggaagtccat

SEQ ID NO: 9398 - DNA, 20 bp, Artificial Sequence
  Description of Artificial Sequence: Synthetic oligonucleotide
tgagggcccggaagtccatg

SEQ ID NO: 9399 - DNA, 20 bp, Artificial Sequence
  Description of Artificial Sequence: Synthetic oligonucleotide
gagggcccggaagtccatgc

SEQ ID NO: 9400 - DNA, 20 bp, Artificial Sequence
  Description of Artificial Sequence: Synthetic oligonucleotide
agggcccggaagtccatgct

SEQ ID NO: 9401 - DNA, 20 bp, Artificial Sequence
  Description of Artificial Sequence: Synthetic oligonucleotide
gggcccggaagtccatgctt

SEQ ID NO: 9402 - DNA, 20 bp, Artificial Sequence
  Description of Artificial Sequence: Synthetic oligonucleotide
ggcccggaagtccatgctta

SEQ ID NO: 9403 - DNA, 20 bp, Artificial Sequence
  Description of Artificial Sequence: Synthetic oligonucleotide
gcccggaagtccatgcttag

SEQ ID NO: 9404 - DNA, 20 bp, Artificial Sequence
  Description of Artificial Sequence: Synthetic oligonucleotide
cccggaagtccatgcttaga

SEQ ID NO: 9405 - DNA, 20 bp, Artificial Sequence
  Description of Artificial Sequence: Synthetic oligonucleotide
ccggaagtccatgcttagaa

SEQ ID NO: 9406 - DNA, 20 bp, Artificial Sequence
  Description of Artificial Sequence: Synthetic oligonucleotide
cggaagtccatgcttagaaa

SEQ ID NO: 9407 - DNA, 20 bp, Artificial Sequence
  Description of Artificial Sequence: Synthetic oligonucleotide
ggaagtccatgcttagaaag

SEQ ID NO: 9408 - DNA, 20 bp, Artificial Sequence
  Description of Artificial Sequence: Synthetic oligonucleotide
gaagtccatgcttagaaagt

SEQ ID NO: 9409 - DNA, 20 bp, Artificial Sequence
  Description of Artificial Sequence: Synthetic oligonucleotide
aagtccatgcttagaaagtg

SEQ ID NO: 9410 - DNA, 20 bp, Artificial Sequence
  Description of Artificial Sequence: Synthetic oligonucleotide
agtccatgcttagaaagtga

SEQ ID NO: 9411 - DNA, 20 bp, Artificial Sequence
  Description of Artificial Sequence: Synthetic oligonucleotide
gtccatgcttagaaagtgat

SEQ ID NO: 9412 - DNA, 20 bp, Artificial Sequence
  Description of Artificial Sequence: Synthetic oligonucleotide
tccatgcttagaaagtgatt

SEQ ID NO: 9413 - DNA, 20 bp, Artificial Sequence
  Description of Artificial Sequence: Synthetic oligonucleotide
ccatgcttagaaagtgattg

SEQ ID NO: 9414 - DNA, 20 bp, Artificial Sequence
  Description of Artificial Sequence: Synthetic oligonucleotide
catgcttagaaagtgattga

SEQ ID NO: 9415 - DNA, 20 bp, Artificial Sequence
  Description of Artificial Sequence: Synthetic oligonucleotide
atgcttagaaagtgattgat

SEQ ID NO: 9416 - DNA, 20 bp, Artificial Sequence
  Description of Artificial Sequence: Synthetic oligonucleotide
tgcttagaaagtgattgata

SEQ ID NO: 9417 - DNA, 20 bp, Artificial Sequence
  Description of Artificial Sequence: Synthetic oligonucleotide
gcttagaaagtgattgatac

SEQ ID NO: 9418 - DNA, 20 bp, Artificial Sequence
  Description of Artificial Sequence: Synthetic oligonucleotide
cttagaaagtgattgataca

SEQ ID NO: 9419 - DNA, 20 bp, Artificial Sequence
  Description of Artificial Sequence: Synthetic oligonucleotide
ttagaaagtgattgatacat

SEQ ID NO: 9420 - DNA, 20 bp, Artificial Sequence
  Description of Artificial Sequence: Synthetic oligonucleotide
tagaaagtgattgatacatg

SEQ ID NO: 9421 - DNA, 20 bp, Artificial Sequence
  Description of Artificial Sequence: Synthetic oligonucleotide
agaaagtgattgatacatgt

SEQ ID NO: 9422 - DNA, 20 bp, Artificial Sequence
  Description of Artificial Sequence: Synthetic oligonucleotide
gaaagtgattgatacatgtt

SEQ ID NO: 9423 - DNA, 20 bp, Artificial Sequence
  Description of Artificial Sequence: Synthetic oligonucleotide
aaagtgattgatacatgttg

SEQ ID NO: 9424 - DNA, 20 bp, Artificial Sequence
  Description of Artificial Sequence: Synthetic oligonucleotide
aagtgattgatacatgttgg

SEQ ID NO: 9425 - DNA, 20 bp, Artificial Sequence
  Description of Artificial Sequence: Synthetic oligonucleotide
agtgattgatacatgttggt

SEQ ID NO: 9426 - DNA, 20 bp, Artificial Sequence
  Description of Artificial Sequence: Synthetic oligonucleotide
gtgattgatacatgttggtt

SEQ ID NO: 9427 - DNA, 20 bp, Artificial Sequence
  Description of Artificial Sequence: Synthetic oligonucleotide
tgattgatacatgttggttc

SEQ ID NO: 9428 - DNA, 20 bp, Artificial Sequence
  Description of Artificial Sequence: Synthetic oligonucleotide
gattgatacatgttggttca

SEQ ID NO: 9429 - DNA, 20 bp, Artificial Sequence
  Description of Artificial Sequence: Synthetic oligonucleotide
attgatacatgttggttcag

SEQ ID NO: 9430 - DNA, 20 bp, Artificial Sequence
  Description of Artificial Sequence: Synthetic oligonucleotide
ttgatacatgttggttcagg

SEQ ID NO: 9431 - DNA, 20 bp, Artificial Sequence
  Description of Artificial Sequence: Synthetic oligonucleotide
tgatacatgttggttcaggt

SEQ ID NO: 9432 - DNA, 20 bp, Artificial Sequence
  Description of Artificial Sequence: Synthetic oligonucleotide
gatacatgttggttcaggta

SEQ ID NO: 9433 - DNA, 20 bp, Artificial Sequence
  Description of Artificial Sequence: Synthetic oligonucleotide
atacatgttggttcaggtaa

SEQ ID NO: 9434 - DNA, 20 bp, Artificial Sequence
  Description of Artificial Sequence: Synthetic oligonucleotide
tacatgttggttcaggtaac

SEQ ID NO: 9435 - DNA, 20 bp, Artificial Sequence
  Description of Artificial Sequence: Synthetic oligonucleotide
acatgttggttcaggtaaca

SEQ ID NO: 9436 - DNA, 20 bp, Artificial Sequence
  Description of Artificial Sequence: Synthetic oligonucleotide
catgttggttcaggtaacag

SEQ ID NO: 9437 - DNA, 20 bp, Artificial Sequence
  Description of Artificial Sequence: Synthetic oligonucleotide
atgttggttcaggtaacaga

SEQ ID NO: 9438 - DNA, 20 bp, Artificial Sequence
  Description of Artificial Sequence: Synthetic oligonucleotide
tgttggttcaggtaacagaa

SEQ ID NO: 9439 - DNA, 20 bp, Artificial Sequence
  Description of Artificial Sequence: Synthetic oligonucleotide
gttggttcaggtaacagaat

SEQ ID NO: 9440 - DNA, 20 bp, Artificial Sequence
  Description of Artificial Sequence: Synthetic oligonucleotide
ttggttcaggtaacagaatt

SEQ ID NO: 9441 - DNA, 20 bp, Artificial Sequence
  Description of Artificial Sequence: Synthetic oligonucleotide
tggttcaggtaacagaattt

SEQ ID NO: 9442 - DNA, 20 bp, Artificial Sequence
  Description of Artificial Sequence: Synthetic oligonucleotide
ggttcaggtaacagaatttt

SEQ ID NO: 9443 - DNA, 20 bp, Artificial Sequence
  Description of Artificial Sequence: Synthetic oligonucleotide
gttcaggtaacagaattttc

SEQ ID NO: 9444 - DNA, 20 bp, Artificial Sequence
  Description of Artificial Sequence: Synthetic oligonucleotide
ttcaggtaacagaattttca

SEQ ID NO: 9445 - DNA, 20 bp, Artificial Sequence
  Description of Artificial Sequence: Synthetic oligonucleotide
tcaggtaacagaattttcaa

SEQ ID NO: 9446 - DNA, 20 bp, Artificial Sequence
  Description of Artificial Sequence: Synthetic oligonucleotide
caggtaacagaattttcaag

SEQ ID NO: 9447 - DNA, 20 bp, Artificial Sequence
  Description of Artificial Sequence: Synthetic oligonucleotide
aggtaacagaattttcaagc

SEQ ID NO: 9448 - DNA, 20 bp, Artificial Sequence
  Description of Artificial Sequence: Synthetic oligonucleotide
ggtaacagaattttcaagct

SEQ ID NO: 9449 - DNA, 20 bp, Artificial Sequence
  Description of Artificial Sequence: Synthetic oligonucleotide
gtaacagaattttcaagctt

SEQ ID NO: 9450 - DNA, 20 bp, Artificial Sequence
  Description of Artificial Sequence: Synthetic oligonucleotide
taacagaattttcaagcttg

SEQ ID NO: 9451 - DNA, 20 bp, Artificial Sequence
  Description of Artificial Sequence: Synthetic oligonucleotide
aacagaattttcaagcttgg

SEQ ID NO: 9452 - DNA, 20 bp, Artificial Sequence
  Description of Artificial Sequence: Synthetic oligonucleotide
acagaattttcaagcttggt

SEQ ID NO: 9453 - DNA, 20 bp, Artificial Sequence
  Description of Artificial Sequence: Synthetic oligonucleotide
cagaattttcaagcttggtt

SEQ ID NO: 9454 - DNA, 20 bp, Artificial Sequence
  Description of Artificial Sequence: Synthetic oligonucleotide
agaattttcaagcttggttt

SEQ ID NO: 9455 - DNA, 20 bp, Artificial Sequence
  Description of Artificial Sequence: Synthetic oligonucleotide
gaattttcaagcttggtttc

SEQ ID NO: 9456 - DNA, 20 bp, Artificial Sequence
  Description of Artificial Sequence: Synthetic oligonucleotide
aattttcaagcttggtttca

SEQ ID NO: 9457 - DNA, 20 bp, Artificial Sequence
  Description of Artificial Sequence: Synthetic oligonucleotide
attttcaagcttggtttcat

SEQ ID NO: 9458 - DNA, 20 bp, Artificial Sequence
  Description of Artificial Sequence: Synthetic oligonucleotide
ttttcaagcttggtttcatg

SEQ ID NO: 9459 - DNA, 20 bp, Artificial Sequence
  Description of Artificial Sequence: Synthetic oligonucleotide
tttcaagcttggtttcatgt

SEQ ID NO: 9460 - DNA, 20 bp, Artificial Sequence
  Description of Artificial Sequence: Synthetic oligonucleotide
ttcaagcttggtttcatgtt

SEQ ID NO: 9461 - DNA, 20 bp, Artificial Sequence
  Description of Artificial Sequence: Synthetic oligonucleotide
tcaagcttggtttcatgtta

SEQ ID NO: 9462 - DNA, 20 bp, Artificial Sequence
  Description of Artificial Sequence: Synthetic oligonucleotide
caagcttggtttcatgttaa

SEQ ID NO: 9463 - DNA, 20 bp, Artificial Sequence
  Description of Artificial Sequence: Synthetic oligonucleotide
aagcttggtttcatgttaaa

SEQ ID NO: 9464 - DNA, 20 bp, Artificial Sequence
  Description of Artificial Sequence: Synthetic oligonucleotide
agcttggtttcatgttaaaa

SEQ ID NO: 9465 - DNA, 20 bp, Artificial Sequence
  Description of Artificial Sequence: Synthetic oligonucleotide
gcttggtttcatgttaaaac

SEQ ID NO: 9466 - DNA, 20 bp, Artificial Sequence
  Description of Artificial Sequence: Synthetic oligonucleotide
cttggtttcatgttaaaact

SEQ ID NO: 9467 - DNA, 20 bp, Artificial Sequence
  Description of Artificial Sequence: Synthetic oligonucleotide
ttggtttcatgttaaaactt

SEQ ID NO: 9468 - DNA, 20 bp, Artificial Sequence
  Description of Artificial Sequence: Synthetic oligonucleotide
tggtttcatgttaaaacttt

SEQ ID NO: 9469 - DNA, 20 bp, Artificial Sequence
  Description of Artificial Sequence: Synthetic oligonucleotide
ggtttcatgttaaaactttt

SEQ ID NO: 9470 - DNA, 20 bp, Artificial Sequence
  Description of Artificial Sequence: Synthetic oligonucleotide
gtttcatgttaaaacttttt

SEQ ID NO: 9471 - DNA, 20 bp, Artificial Sequence
  Description of Artificial Sequence: Synthetic oligonucleotide
tttcatgttaaaactttttc

SEQ ID NO: 9472 - DNA, 20 bp, Artificial Sequence
  Description of Artificial Sequence: Synthetic oligonucleotide
ttcatgttaaaactttttct

SEQ ID NO: 9473 - DNA, 20 bp, Artificial Sequence
  Description of Artificial Sequence: Synthetic oligonucleotide
tcatgttaaaactttttctt

SEQ ID NO: 9474 - DNA, 20 bp, Artificial Sequence
  Description of Artificial Sequence: Synthetic oligonucleotide
catgttaaaactttttctta

SEQ ID NO: 9475 - DNA, 20 bp, Artificial Sequence
  Description of Artificial Sequence: Synthetic oligonucleotide
atgttaaaactttttcttaa

SEQ ID NO: 9476 - DNA, 20 bp, Artificial Sequence
  Description of Artificial Sequence: Synthetic oligonucleotide
tgttaaaactttttcttaat

SEQ ID NO: 9477 - DNA, 20 bp, Artificial Sequence
  Description of Artificial Sequence: Synthetic oligonucleotide
gttaaaactttttcttaatt

SEQ ID NO: 9478 - DNA, 20 bp, Artificial Sequence
  Description of Artificial Sequence: Synthetic oligonucleotide
ttaaaactttttcttaattt

SEQ ID NO: 9479 - DNA, 20 bp, Artificial Sequence
  Description of Artificial Sequence: Synthetic oligonucleotide
taaaactttttcttaatttg

SEQ ID NO: 9480 - DNA, 20 bp, Artificial Sequence
  Description of Artificial Sequence: Synthetic oligonucleotide
aaaactttttcttaatttga

SEQ ID NO: 9481 - DNA, 20 bp, Artificial Sequence
  Description of Artificial Sequence: Synthetic oligonucleotide
aaactttttcttaatttgag

SEQ ID NO: 9482 - DNA, 20 bp, Artificial Sequence
  Description of Artificial Sequence: Synthetic oligonucleotide
aactttttcttaatttgagc

SEQ ID NO: 9483 - DNA, 20 bp, Artificial Sequence
  Description of Artificial Sequence: Synthetic oligonucleotide
actttttcttaatttgagct

SEQ ID NO: 9484 - DNA, 20 bp, Artificial Sequence
  Description of Artificial Sequence: Synthetic oligonucleotide
ctttttcttaatttgagctg

SEQ ID NO: 9485 - DNA, 20 bp, Artificial Sequence
  Description of Artificial Sequence: Synthetic oligonucleotide
tttttcttaatttgagctga

SEQ ID NO: 9486 - DNA, 20 bp, Artificial Sequence
  Description of Artificial Sequence: Synthetic oligonucleotide
ttttcttaatttgagctgag

SEQ ID NO: 9487 - DNA, 20 bp, Artificial Sequence
  Description of Artificial Sequence: Synthetic oligonucleotide
tttcttaatttgagctgagg

SEQ ID NO: 9488 - DNA, 20 bp, Artificial Sequence
  Description of Artificial Sequence: Synthetic oligonucleotide
ttcttaatttgagctgaggt

SEQ ID NO: 9489 - DNA, 20 bp, Artificial Sequence
  Description of Artificial Sequence: Synthetic oligonucleotide
tcttaatttgagctgaggtt

SEQ ID NO: 9490 - DNA, 20 bp, Artificial Sequence
  Description of Artificial Sequence: Synthetic oligonucleotide
cttaatttgagctgaggtta

SEQ ID NO: 9491 - DNA, 20 bp, Artificial Sequence
  Description of Artificial Sequence: Synthetic oligonucleotide
ttaatttgagctgaggttaa

SEQ ID NO: 9492 - DNA, 20 bp, Artificial Sequence
  Description of Artificial Sequence: Synthetic oligonucleotide
taatttgagctgaggttaac

SEQ ID NO: 9493 - DNA, 20 bp, Artificial Sequence
  Description of Artificial Sequence: Synthetic oligonucleotide
aatttgagctgaggttaacc

SEQ ID NO: 9494 - DNA, 20 bp, Artificial Sequence
  Description of Artificial Sequence: Synthetic oligonucleotide
atttgagctgaggttaacca

SEQ ID NO: 9495 - DNA, 20 bp, Artificial Sequence
  Description of Artificial Sequence: Synthetic oligonucleotide
tttgagctgaggttaaccat

SEQ ID NO: 9496 - DNA, 20 bp, Artificial Sequence
  Description of Artificial Sequence: Synthetic oligonucleotide
ttgagctgaggttaaccatt

SEQ ID NO: 9497 - DNA, 20 bp, Artificial Sequence
  Description of Artificial Sequence: Synthetic oligonucleotide
tgagctgaggttaaccattg

SEQ ID NO: 9498 - DNA, 20 bp, Artificial Sequence
  Description of Artificial Sequence: Synthetic oligonucleotide
gagctgaggttaaccattga

SEQ ID NO: 9499 - DNA, 20 bp, Artificial Sequence
  Description of Artificial Sequence: Synthetic oligonucleotide
agctgaggttaaccattgac

SEQ ID NO: 9500 - DNA, 20 bp, Artificial Sequence
  Description of Artificial Sequence: Synthetic oligonucleotide
gctgaggttaaccattgact

SEQ ID NO: 9501 - DNA, 20 bp, Artificial Sequence
  Description of Artificial Sequence: Synthetic oligonucleotide
ctgaggttaaccattgactt

SEQ ID NO: 9502 - DNA, 20 bp, Artificial Sequence
  Description of Artificial Sequence: Synthetic oligonucleotide
tgaggttaaccattgactta

SEQ ID NO: 9503 - DNA, 20 bp, Artificial Sequence
  Description of Artificial Sequence: Synthetic oligonucleotide
gaggttaaccattgacttag

SEQ ID NO: 9504 - DNA, 20 bp, Artificial Sequence
  Description of Artificial Sequence: Synthetic oligonucleotide
aggttaaccattgacttagt

SEQ ID NO: 9505 - DNA, 20 bp, Artificial Sequence
  Description of Artificial Sequence: Synthetic oligonucleotide
ggttaaccattgacttagtc

SEQ ID NO: 9506 - DNA, 20 bp, Artificial Sequence
  Description of Artificial Sequence: Synthetic oligonucleotide
gttaaccattgacttagtca

SEQ ID NO: 9507 - DNA, 20 bp, Artificial Sequence
  Description of Artificial Sequence: Synthetic oligonucleotide
ttaaccattgacttagtcag

SEQ ID NO: 9508 - DNA, 20 bp, Artificial Sequence
  Description of Artificial Sequence: Synthetic oligonucleotide
taaccattgacttagtcagt

SEQ ID NO: 9509 - DNA, 20 bp, Artificial Sequence
  Description of Artificial Sequence: Synthetic oligonucleotide
aaccattgacttagtcagta

SEQ ID NO: 9510 - DNA, 20 bp, Artificial Sequence
  Description of Artificial Sequence: Synthetic oligonucleotide
accattgacttagtcagtag

SEQ ID NO: 9511 - DNA, 20 bp, Artificial Sequence
  Description of Artificial Sequence: Synthetic oligonucleotide
ccattgacttagtcagtaga

SEQ ID NO: 9512 - DNA, 20 bp, Artificial Sequence
  Description of Artificial Sequence: Synthetic oligonucleotide
cattgacttagtcagtagaa

SEQ ID NO: 9513 - DNA, 20 bp, Artificial Sequence
  Description of Artificial Sequence: Synthetic oligonucleotide
attgacttagtcagtagaag

SEQ ID NO: 9514 - DNA, 20 bp, Artificial Sequence
  Description of Artificial Sequence: Synthetic oligonucleotide
ttgacttagtcagtagaagc

SEQ ID NO: 9515 - DNA, 20 bp, Artificial Sequence
  Description of Artificial Sequence: Synthetic oligonucleotide
tgacttagtcagtagaagct

SEQ ID NO: 9516 - DNA, 20 bp, Artificial Sequence
  Description of Artificial Sequence: Synthetic oligonucleotide
gacttagtcagtagaagctg

SEQ ID NO: 9517 - DNA, 20 bp, Artificial Sequence
  Description of Artificial Sequence: Synthetic oligonucleotide
acttagtcagtagaagctga

SEQ ID NO: 9518 - DNA, 20 bp, Artificial Sequence
  Description of Artificial Sequence: Synthetic oligonucleotide
cttagtcagtagaagctgat

SEQ ID NO: 9519 - DNA, 20 bp, Artificial Sequence
  Description of Artificial Sequence: Synthetic oligonucleotide
ttagtcagtagaagctgatc

SEQ ID NO: 9520 - DNA, 20 bp, Artificial Sequence
  Description of Artificial Sequence: Synthetic oligonucleotide
tagtcagtagaagctgatca

SEQ ID NO: 9521 - DNA, 20 bp, Artificial Sequence
  Description of Artificial Sequence: Synthetic oligonucleotide
agtcagtagaagctgatcat

SEQ ID NO: 9522 - DNA, 20 bp, Artificial Sequence
  Description of Artificial Sequence: Synthetic oligonucleotide
gtcagtagaagctgatcatg

SEQ ID NO: 9523 - DNA, 20 bp, Artificial Sequence
  Description of Artificial Sequence: Synthetic oligonucleotide
tcagtagaagctgatcatgt

SEQ ID NO: 9524 - DNA, 20 bp, Artificial Sequence
  Description of Artificial Sequence: Synthetic oligonucleotide
cagtagaagctgatcatgtc

SEQ ID NO: 9525 - DNA, 20 bp, Artificial Sequence
  Description of Artificial Sequence: Synthetic oligonucleotide
agtagaagctgatcatgtct

SEQ ID NO: 9526 - DNA, 20 bp, Artificial Sequence
  Description of Artificial Sequence: Synthetic oligonucleotide
gtagaagctgatcatgtctt

SEQ ID NO: 9527 - DNA, 20 bp, Artificial Sequence
  Description of Artificial Sequence: Synthetic oligonucleotide
tagaagctgatcatgtcttt

SEQ ID NO: 9528 - DNA, 20 bp, Artificial Sequence
  Description of Artificial Sequence: Synthetic oligonucleotide
agaagctgatcatgtctttg

SEQ ID NO: 9529 - DNA, 20 bp, Artificial Sequence
  Description of Artificial Sequence: Synthetic oligonucleotide
gaagctgatcatgtctttgt

SEQ ID NO: 9530 - DNA, 20 bp, Artificial Sequence
  Description of Artificial Sequence: Synthetic oligonucleotide
aagctgatcatgtctttgtt

SEQ ID NO: 9531 - DNA, 20 bp, Artificial Sequence
  Description of Artificial Sequence: Synthetic oligonucleotide
agctgatcatgtctttgttc

SEQ ID NO: 9532 - DNA, 20 bp, Artificial Sequence
  Description of Artificial Sequence: Synthetic oligonucleotide
gctgatcatgtctttgttct

SEQ ID NO: 9533 - DNA, 20 bp, Artificial Sequence
  Description of Artificial Sequence: Synthetic oligonucleotide
ctgatcatgtctttgttctt

SEQ ID NO: 9534 - DNA, 20 bp, Artificial Sequence
  Description of Artificial Sequence: Synthetic oligonucleotide
tgatcatgtctttgttcttc

SEQ ID NO: 9535 - DNA, 20 bp, Artificial Sequence
  Description of Artificial Sequence: Synthetic oligonucleotide
gatcatgtctttgttcttca

SEQ ID NO: 9536 - DNA, 20 bp, Artificial Sequence
  Description of Artificial Sequence: Synthetic oligonucleotide
atcatgtctttgttcttcat

SEQ ID NO: 9537 - DNA, 20 bp, Artificial Sequence
  Description of Artificial Sequence: Synthetic oligonucleotide
tcatgtctttgttcttcatg

SEQ ID NO: 9538 - DNA, 20 bp, Artificial Sequence
  Description of Artificial Sequence: Synthetic oligonucleotide
catgtctttgttcttcatgt

SEQ ID NO: 9539 - DNA, 20 bp, Artificial Sequence
  Description of Artificial Sequence: Synthetic oligonucleotide
atgtctttgttcttcatgta

SEQ ID NO: 9540 - DNA, 20 bp, Artificial Sequence
  Description of Artificial Sequence: Synthetic oligonucleotide
tgtctttgttcttcatgtag

SEQ ID NO: 9541 - DNA, 20 bp, Artificial Sequence
  Description of Artificial Sequence: Synthetic oligonucleotide
gtctttgttcttcatgtagt

SEQ ID NO: 9542 - DNA, 20 bp, Artificial Sequence
  Description of Artificial Sequence: Synthetic oligonucleotide
tctttgttcttcatgtagtt

SEQ ID NO: 9543 - DNA, 20 bp, Artificial Sequence
  Description of Artificial Sequence: Synthetic oligonucleotide
ctttgttcttcatgtagttt

SEQ ID NO: 9544 - DNA, 20 bp, Artificial Sequence
  Description of Artificial Sequence: Synthetic oligonucleotide
tttgttcttcatgtagttta

SEQ ID NO: 9545 - DNA, 20 bp, Artificial Sequence
  Description of Artificial Sequence: Synthetic oligonucleotide
ttgttcttcatgtagtttat

SEQ ID NO: 9546 - DNA, 20 bp, Artificial Sequence
  Description of Artificial Sequence: Synthetic oligonucleotide
tgttcttcatgtagtttata

SEQ ID NO: 9547 - DNA, 20 bp, Artificial Sequence
  Description of Artificial Sequence: Synthetic oligonucleotide
gttcttcatgtagtttataa

SEQ ID NO: 9548 - DNA, 20 bp, Artificial Sequence
  Description of Artificial Sequence: Synthetic oligonucleotide
ttcttcatgtagtttataat

SEQ ID NO: 9549 - DNA, 20 bp, Artificial Sequence
  Description of Artificial Sequence: Synthetic oligonucleotide
tcttcatgtagtttataatg

SEQ ID NO: 9550 - DNA, 20 bp, Artificial Sequence
  Description of Artificial Sequence: Synthetic oligonucleotide
cttcatgtagtttataatgg

SEQ ID NO: 9551 - DNA, 20 bp, Artificial Sequence
  Description of Artificial Sequence: Synthetic oligonucleotide
ttcatgtagtttataatggg

SEQ ID NO: 9552 - DNA, 20 bp, Artificial Sequence
  Description of Artificial Sequence: Synthetic oligonucleotide
tcatgtagtttataatggga

SEQ ID NO: 9553 - DNA, 20 bp, Artificial Sequence
  Description of Artificial Sequence: Synthetic oligonucleotide
catgtagtttataatgggac

SEQ ID NO: 9554 - DNA, 20 bp, Artificial Sequence
  Description of Artificial Sequence: Synthetic oligonucleotide
atgtagtttataatgggacc

SEQ ID NO: 9555 - DNA, 20 bp, Artificial Sequence
  Description of Artificial Sequence: Synthetic oligonucleotide
tgtagtttataatgggacca

SEQ ID NO: 9556 - DNA, 20 bp, Artificial Sequence
  Description of Artificial Sequence: Synthetic oligonucleotide
gtagtttataatgggaccaa

SEQ ID NO: 9557 - DNA, 20 bp, Artificial Sequence
  Description of Artificial Sequence: Synthetic oligonucleotide
tagtttataatgggaccaat

SEQ ID NO: 9558 - DNA, 20 bp, Artificial Sequence
  Description of Artificial Sequence: Synthetic oligonucleotide
agtttataatgggaccaatg

SEQ ID NO: 9559 - DNA, 20 bp, Artificial Sequence
  Description of Artificial Sequence: Synthetic oligonucleotide
gtttataatgggaccaatgg

SEQ ID NO: 9560 - DNA, 20 bp, Artificial Sequence
  Description of Artificial Sequence: Synthetic oligonucleotide
tttataatgggaccaatggt

SEQ ID NO: 9561 - DNA, 20 bp, Artificial Sequence
  Description of Artificial Sequence: Synthetic oligonucleotide
ttataatgggaccaatggtt

SEQ ID NO: 9562 - DNA, 20 bp, Artificial Sequence
  Description of Artificial Sequence: Synthetic oligonucleotide
tataatgggaccaatggttt

SEQ ID NO: 9563 - DNA, 20 bp, Artificial Sequence
  Description of Artificial Sequence: Synthetic oligonucleotide
ataatgggaccaatggtttt

SEQ ID NO: 9564 - DNA, 20 bp, Artificial Sequence
  Description of Artificial Sequence: Synthetic oligonucleotide
taatgggaccaatggttttt

SEQ ID NO: 9565 - DNA, 20 bp, Artificial Sequence
  Description of Artificial Sequence: Synthetic oligonucleotide
aatgggaccaatggttttta

SEQ ID NO: 9566 - DNA, 20 bp, Artificial Sequence
  Description of Artificial Sequence: Synthetic oligonucleotide
atgggaccaatggtttttat

SEQ ID NO: 9567 - DNA, 20 bp, Artificial Sequence
  Description of Artificial Sequence: Synthetic oligonucleotide
tgggaccaatggtttttata

SEQ ID NO: 9568 - DNA, 20 bp, Artificial Sequence
  Description of Artificial Sequence: Synthetic oligonucleotide
gggaccaatggtttttatat

SEQ ID NO: 9569 - DNA, 20 bp, Artificial Sequence
  Description of Artificial Sequence: Synthetic oligonucleotide
ggaccaatggtttttatatc

SEQ ID NO: 9570 - DNA, 20 bp, Artificial Sequence
  Description of Artificial Sequence: Synthetic oligonucleotide
gaccaatggtttttatatca

SEQ ID NO: 9571 - DNA, 20 bp, Artificial Sequence
  Description of Artificial Sequence: Synthetic oligonucleotide
accaatggtttttatatcag

SEQ ID NO: 9572 - DNA, 20 bp, Artificial Sequence
  Description of Artificial Sequence: Synthetic oligonucleotide
ccaatggtttttatatcagc

SEQ ID NO: 9573 - DNA, 20 bp, Artificial Sequence
  Description of Artificial Sequence: Synthetic oligonucleotide
caatggtttttatatcagca

SEQ ID NO: 9574 - DNA, 20 bp, Artificial Sequence
  Description of Artificial Sequence: Synthetic oligonucleotide
aatggtttttatatcagcaa

SEQ ID NO: 9575 - DNA, 20 bp, Artificial Sequence
  Description of Artificial Sequence: Synthetic oligonucleotide
atggtttttatatcagcaag

SEQ ID NO: 9576 - DNA, 20 bp, Artificial Sequence
  Description of Artificial Sequence: Synthetic oligonucleotide
tggtttttatatcagcaaga

SEQ ID NO: 9577 - DNA, 20 bp, Artificial Sequence
  Description of Artificial Sequence: Synthetic oligonucleotide
ggtttttatatcagcaagaa

SEQ ID NO: 9578 - DNA, 20 bp, Artificial Sequence
  Description of Artificial Sequence: Synthetic oligonucleotide
gtttttatatcagcaagaaa

SEQ ID NO: 9579 - DNA, 20 bp, Artificial Sequence
  Description of Artificial Sequence: Synthetic oligonucleotide
tttttatatcagcaagaaat

SEQ ID NO: 9580 - DNA, 20 bp, Artificial Sequence
  Description of Artificial Sequence: Synthetic oligonucleotide
ttttatatcagcaagaaatg

SEQ ID NO: 9581 - DNA, 20 bp, Artificial Sequence
  Description of Artificial Sequence: Synthetic oligonucleotide
tttatatcagcaagaaatga

SEQ ID NO: 9582 - DNA, 20 bp, Artificial Sequence
  Description of Artificial Sequence: Synthetic oligonucleotide
ttatatcagcaagaaatgac

SEQ ID NO: 9583 - DNA, 20 bp, Artificial Sequence
  Description of Artificial Sequence: Synthetic oligonucleotide
tatatcagcaagaaatgaca

SEQ ID NO: 9584 - DNA, 20 bp, Artificial Sequence
  Description of Artificial Sequence: Synthetic oligonucleotide
atatcagcaagaaatgacat

SEQ ID NO: 9585 - DNA, 20 bp, Artificial Sequence
  Description of Artificial Sequence: Synthetic oligonucleotide
tatcagcaagaaatgacatg

SEQ ID NO: 9586 - DNA, 20 bp, Artificial Sequence
  Description of Artificial Sequence: Synthetic oligonucleotide
atcagcaagaaatgacatgt

SEQ ID NO: 9587 - DNA, 20 bp, Artificial Sequence
  Description of Artificial Sequence: Synthetic oligonucleotide
tcagcaagaaatgacatgtc

SEQ ID NO: 9588 - DNA, 20 bp, Artificial Sequence
  Description of Artificial Sequence: Synthetic oligonucleotide
cagcaagaaatgacatgtct

SEQ ID NO: 9589 - DNA, 20 bp, Artificial Sequence
  Description of Artificial Sequence: Synthetic oligonucleotide
agcaagaaatgacatgtcta

SEQ ID NO: 9590 - DNA, 20 bp, Artificial Sequence
  Description of Artificial Sequence: Synthetic oligonucleotide
gcaagaaatgacatgtctat

SEQ ID NO: 9591 - DNA, 20 bp, Artificial Sequence
  Description of Artificial Sequence: Synthetic oligonucleotide
caagaaatgacatgtctata

SEQ ID NO: 9592 - DNA, 20 bp, Artificial Sequence
  Description of Artificial Sequence: Synthetic oligonucleotide
aagaaatgacatgtctatag

SEQ ID NO: 9593 - DNA, 20 bp, Artificial Sequence
  Description of Artificial Sequence: Synthetic oligonucleotide
agaaatgacatgtctatagg

SEQ ID NO: 9594 - DNA, 20 bp, Artificial Sequence
  Description of Artificial Sequence: Synthetic oligonucleotide
gaaatgacatgtctatagga

SEQ ID NO: 9595 - DNA, 20 bp, Artificial Sequence
  Description of Artificial Sequence: Synthetic oligonucleotide
aaatgacatgtctataggat

SEQ ID NO: 9596 - DNA, 20 bp, Artificial Sequence
  Description of Artificial Sequence: Synthetic oligonucleotide
aatgacatgtctataggata

SEQ ID NO: 9597 - DNA, 20 bp, Artificial Sequence
  Description of Artificial Sequence: Synthetic oligonucleotide
atgacatgtctataggatat

SEQ ID NO: 9598 - DNA, 20 bp, Artificial Sequence
  Description of Artificial Sequence: Synthetic oligonucleotide
tgacatgtctataggatatg

SEQ ID NO: 9599 - DNA, 20 bp, Artificial Sequence
  Description of Artificial Sequence: Synthetic oligonucleotide
gacatgtctataggatatgc

SEQ ID NO: 9600 - DNA, 20 bp, Artificial Sequence
  Description of Artificial Sequence: Synthetic oligonucleotide
acatgtctataggatatgct

SEQ ID NO: 9601 - DNA, 20 bp, Artificial Sequence
  Description of Artificial Sequence: Synthetic oligonucleotide
catgtctataggatatgctc

SEQ ID NO: 9602 - DNA, 20 bp, Artificial Sequence
  Description of Artificial Sequence: Synthetic oligonucleotide
atgtctataggatatgctcc

SEQ ID NO: 9603 - DNA, 20 bp, Artificial Sequence
  Description of Artificial Sequence: Synthetic oligonucleotide
tgtctataggatatgctcct

SEQ ID NO: 9604 - DNA, 20 bp, Artificial Sequence
  Description of Artificial Sequence: Synthetic oligonucleotide
gtctataggatatgctcctt

SEQ ID NO: 9605 - DNA, 20 bp, Artificial Sequence
  Description of Artificial Sequence: Synthetic oligonucleotide
tctataggatatgctcctta

SEQ ID NO: 9606 - DNA, 20 bp, Artificial Sequence
  Description of Artificial Sequence: Synthetic oligonucleotide
ctataggatatgctccttac

SEQ ID NO: 9607 - DNA, 20 bp, Artificial Sequence
  Description of Artificial Sequence: Synthetic oligonucleotide
tataggatatgctccttaca

SEQ ID NO: 9608 - DNA, 20 bp, Artificial Sequence
  Description of Artificial Sequence: Synthetic oligonucleotide
ataggatatgctccttacaa

SEQ ID NO: 9609 - DNA, 20 bp, Artificial Sequence
  Description of Artificial Sequence: Synthetic oligonucleotide
taggatatgctccttacaac

SEQ ID NO: 9610 - DNA, 20 bp, Artificial Sequence
  Description of Artificial Sequence: Synthetic oligonucleotide
aggatatgctccttacaact

SEQ ID NO: 9611 - DNA, 20 bp, Artificial Sequence
  Description of Artificial Sequence: Synthetic oligonucleotide
ggatatgctccttacaacta

SEQ ID NO: 9612 - DNA, 20 bp, Artificial Sequence
  Description of Artificial Sequence: Synthetic oligonucleotide
gatatgctccttacaactaa

SEQ ID NO: 9613 - DNA, 20 bp, Artificial Sequence
  Description of Artificial Sequence: Synthetic oligonucleotide
atatgctccttacaactaat

SEQ ID NO: 9614 - DNA, 20 bp, Artificial Sequence
  Description of Artificial Sequence: Synthetic oligonucleotide
tatgctccttacaactaata

SEQ ID NO: 9615 - DNA, 20 bp, Artificial Sequence
  Description of Artificial Sequence: Synthetic oligonucleotide
atgctccttacaactaatat

SEQ ID NO: 9616 - DNA, 20 bp, Artificial Sequence
  Description of Artificial Sequence: Synthetic oligonucleotide
tgctccttacaactaatatt

SEQ ID NO: 9617 - DNA, 20 bp, Artificial Sequence
  Description of Artificial Sequence: Synthetic oligonucleotide
gctccttacaactaatattt

SEQ ID NO: 9618 - DNA, 20 bp, Artificial Sequence
  Description of Artificial Sequence: Synthetic oligonucleotide
ctccttacaactaatatttt

SEQ ID NO: 9619 - DNA, 20 bp, Artificial Sequence
  Description of Artificial Sequence: Synthetic oligonucleotide
tccttacaactaatattttc

SEQ ID NO: 9620 - DNA, 20 bp, Artificial Sequence
  Description of Artificial Sequence: Synthetic oligonucleotide
ccttacaactaatattttcc

SEQ ID NO: 9621 - DNA, 20 bp, Artificial Sequence
  Description of Artificial Sequence: Synthetic oligonucleotide
cttacaactaatattttcct

SEQ ID NO: 9622 - DNA, 20 bp, Artificial Sequence
  Description of Artificial Sequence: Synthetic oligonucleotide
ttacaactaatattttcctg

SEQ ID NO: 9623 - DNA, 20 bp, Artificial Sequence
  Description of Artificial Sequence: Synthetic oligonucleotide
tacaactaatattttcctga

SEQ ID NO: 9624 - DNA, 20 bp, Artificial Sequence
  Description of Artificial Sequence: Synthetic oligonucleotide
acaactaatattttcctgat

SEQ ID NO: 9625 - DNA, 20 bp, Artificial Sequence
  Description of Artificial Sequence: Synthetic oligonucleotide
caactaatattttcctgata

SEQ ID NO: 9626 - DNA, 20 bp, Artificial Sequence
  Description of Artificial Sequence: Synthetic oligonucleotide
aactaatattttcctgataa

SEQ ID NO: 9627 - DNA, 20 bp, Artificial Sequence
  Description of Artificial Sequence: Synthetic oligonucleotide
actaatattttcctgataat

SEQ ID NO: 9628 - DNA, 20 bp, Artificial Sequence
  Description of Artificial Sequence: Synthetic oligonucleotide
ctaatattttcctgataatt

SEQ ID NO: 9629 - DNA, 20 bp, Artificial Sequence
  Description of Artificial Sequence: Synthetic oligonucleotide
taatattttcctgataattt

SEQ ID NO: 9630 - DNA, 20 bp, Artificial Sequence
  Description of Artificial Sequence: Synthetic oligonucleotide
aatattttcctgataatttc

SEQ ID NO: 9631 - DNA, 20 bp, Artificial Sequence
  Description of Artificial Sequence: Synthetic oligonucleotide
atattttcctgataatttca

SEQ ID NO: 9632 - DNA, 20 bp, Artificial Sequence
  Description of Artificial Sequence: Synthetic oligonucleotide
tattttcctgataatttcag

SEQ ID NO: 9633 - DNA, 20 bp, Artificial Sequence
  Description of Artificial Sequence: Synthetic oligonucleotide
attttcctgataatttcaga

SEQ ID NO: 9634 - DNA, 20 bp, Artificial Sequence
  Description of Artificial Sequence: Synthetic oligonucleotide
ttttcctgataatttcagaa

SEQ ID NO: 9635 - DNA, 20 bp, Artificial Sequence
  Description of Artificial Sequence: Synthetic oligonucleotide
tttcctgataatttcagaaa

SEQ ID NO: 9636 - DNA, 20 bp, Artificial Sequence
  Description of Artificial Sequence: Synthetic oligonucleotide
ttcctgataatttcagaaaa

SEQ ID NO: 9637 - DNA, 20 bp, Artificial Sequence
  Description of Artificial Sequence: Synthetic oligonucleotide
tcctgataatttcagaaaac

SEQ ID NO: 9638 - DNA, 20 bp, Artificial Sequence
  Description of Artificial Sequence: Synthetic oligonucleotide
cctgataatttcagaaaacc

SEQ ID NO: 9639 - DNA, 20 bp, Artificial Sequence
  Description of Artificial Sequence: Synthetic oligonucleotide
ctgataatttcagaaaacca

SEQ ID NO: 9640 - DNA, 20 bp, Artificial Sequence
  Description of Artificial Sequence: Synthetic oligonucleotide
tgataatttcagaaaaccaa

SEQ ID NO: 9641 - DNA, 20 bp, Artificial Sequence
  Description of Artificial Sequence: Synthetic oligonucleotide
gataatttcagaaaaccaaa

SEQ ID NO: 9642 - DNA, 20 bp, Artificial Sequence
  Description of Artificial Sequence: Synthetic oligonucleotide
ataatttcagaaaaccaaat

SEQ ID NO: 9643 - DNA, 20 bp, Artificial Sequence
  Description of Artificial Sequence: Synthetic oligonucleotide
taatttcagaaaaccaaatt

SEQ ID NO: 9644 - DNA, 20 bp, Artificial Sequence
  Description of Artificial Sequence: Synthetic oligonucleotide
aatttcagaaaaccaaattt

SEQ ID NO: 9645 - DNA, 20 bp, Artificial Sequence
  Description of Artificial Sequence: Synthetic oligonucleotide
atttcagaaaaccaaatttt

SEQ ID NO: 9646 - DNA, 20 bp, Artificial Sequence
  Description of Artificial Sequence: Synthetic oligonucleotide
tttcagaaaaccaaattttt

SEQ ID NO: 9647 - DNA, 20 bp, Artificial Sequence
  Description of Artificial Sequence: Synthetic oligonucleotide
ttcagaaaaccaaattttta

SEQ ID NO: 9648 - DNA, 20 bp, Artificial Sequence
  Description of Artificial Sequence: Synthetic oligonucleotide
tcagaaaaccaaatttttat

SEQ ID NO: 9649 - DNA, 20 bp, Artificial Sequence
  Description of Artificial Sequence: Synthetic oligonucleotide
cagaaaaccaaatttttatc

SEQ ID NO: 9650 - DNA, 20 bp, Artificial Sequence
  Description of Artificial Sequence: Synthetic oligonucleotide
agaaaaccaaatttttatct

SEQ ID NO: 9651 - DNA, 20 bp, Artificial Sequence
  Description of Artificial Sequence: Synthetic oligonucleotide
gaaaaccaaatttttatctc

SEQ ID NO: 9652 - DNA, 20 bp, Artificial Sequence
  Description of Artificial Sequence: Synthetic oligonucleotide
aaaaccaaatttttatctct

SEQ ID NO: 9653 - DNA, 20 bp, Artificial Sequence
  Description of Artificial Sequence: Synthetic oligonucleotide
aaaccaaatttttatctcta

SEQ ID NO: 9654 - DNA, 20 bp, Artificial Sequence
  Description of Artificial Sequence: Synthetic oligonucleotide
aaccaaatttttatctctaa

SEQ ID NO: 9655 - DNA, 20 bp, Artificial Sequence
  Description of Artificial Sequence: Synthetic oligonucleotide
accaaatttttatctctaaa

SEQ ID NO: 9656 - DNA, 20 bp, Artificial Sequence
  Description of Artificial Sequence: Synthetic oligonucleotide
ccaaatttttatctctaaac

SEQ ID NO: 9657 - DNA, 20 bp, Artificial Sequence
  Description of Artificial Sequence: Synthetic oligonucleotide
caaatttttatctctaaacc

SEQ ID NO: 9658 - DNA, 20 bp, Artificial Sequence
  Description of Artificial Sequence: Synthetic oligonucleotide
aaatttttatctctaaaccg

SEQ ID NO: 9659 - DNA, 20 bp, Artificial Sequence
  Description of Artificial Sequence: Synthetic oligonucleotide
aatttttatctctaaaccgt

SEQ ID NO: 9660 - DNA, 20 bp, Artificial Sequence
  Description of Artificial Sequence: Synthetic oligonucleotide
atttttatctctaaaccgta

SEQ ID NO: 9661 - DNA, 20 bp, Artificial Sequence
  Description of Artificial Sequence: Synthetic oligonucleotide
tttttatctctaaaccgtaa

SEQ ID NO: 9662 - DNA, 20 bp, Artificial Sequence
  Description of Artificial Sequence: Synthetic oligonucleotide
ttttatctctaaaccgtaaa

SEQ ID NO: 9663 - DNA, 20 bp, Artificial Sequence
  Description of Artificial Sequence: Synthetic oligonucleotide
tttatctctaaaccgtaaat

SEQ ID NO: 9664 - DNA, 20 bp, Artificial Sequence
  Description of Artificial Sequence: Synthetic oligonucleotide
ttatctctaaaccgtaaatt

SEQ ID NO: 9665 - DNA, 20 bp, Artificial Sequence
  Description of Artificial Sequence: Synthetic oligonucleotide
tatctctaaaccgtaaattc

SEQ ID NO: 9666 - DNA, 20 bp, Artificial Sequence
  Description of Artificial Sequence: Synthetic oligonucleotide
atctctaaaccgtaaattca

SEQ ID NO: 9667 - DNA, 20 bp, Artificial Sequence
  Description of Artificial Sequence: Synthetic oligonucleotide
tctctaaaccgtaaattcat

SEQ ID NO: 9668 - DNA, 20 bp, Artificial Sequence
  Description of Artificial Sequence: Synthetic oligonucleotide
ctctaaaccgtaaattcatg

SEQ ID NO: 9669 - DNA, 20 bp, Artificial Sequence
  Description of Artificial Sequence: Synthetic oligonucleotide
tctaaaccgtaaattcatgt

SEQ ID NO: 9670 - DNA, 20 bp, Artificial Sequence
  Description of Artificial Sequence: Synthetic oligonucleotide
ctaaaccgtaaattcatgtt

SEQ ID NO: 9671 - DNA, 20 bp, Artificial Sequence
  Description of Artificial Sequence: Synthetic oligonucleotide
taaaccgtaaattcatgttg

SEQ ID NO: 9672 - DNA, 20 bp, Artificial Sequence
  Description of Artificial Sequence: Synthetic oligonucleotide
aaaccgtaaattcatgttgg

SEQ ID NO: 9673 - DNA, 20 bp, Artificial Sequence
  Description of Artificial Sequence: Synthetic oligonucleotide
aaccgtaaattcatgttggc

SEQ ID NO: 9674 - DNA, 20 bp, Artificial Sequence
  Description of Artificial Sequence: Synthetic oligonucleotide
accgtaaattcatgttggcc

SEQ ID NO: 9675 - DNA, 20 bp, Artificial Sequence
  Description of Artificial Sequence: Synthetic oligonucleotide
ccgtaaattcatgttggccc

SEQ ID NO: 9676 - DNA, 20 bp, Artificial Sequence
  Description of Artificial Sequence: Synthetic oligonucleotide
cgtaaattcatgttggccca

SEQ ID NO: 9677 - DNA, 20 bp, Artificial Sequence
  Description of Artificial Sequence: Synthetic oligonucleotide
gtaaattcatgttggcccac

SEQ ID NO: 9678 - DNA, 20 bp, Artificial Sequence
  Description of Artificial Sequence: Synthetic oligonucleotide
taaattcatgttggcccacc

SEQ ID NO: 9679 - DNA, 20 bp, Artificial Sequence
  Description of Artificial Sequence: Synthetic oligonucleotide
aaattcatgttggcccacct

SEQ ID NO: 9680 - DNA, 20 bp, Artificial Sequence
  Description of Artificial Sequence: Synthetic oligonucleotide
aattcatgttggcccacctg

SEQ ID NO: 9681 - DNA, 20 bp, Artificial Sequence
  Description of Artificial Sequence: Synthetic oligonucleotide
attcatgttggcccacctga

SEQ ID NO: 9682 - DNA, 20 bp, Artificial Sequence
  Description of Artificial Sequence: Synthetic oligonucleotide
ttcatgttggcccacctgag

SEQ ID NO: 9683 - DNA, 20 bp, Artificial Sequence
  Description of Artificial Sequence: Synthetic oligonucleotide
tcatgttggcccacctgagc

SEQ ID NO: 9684 - DNA, 20 bp, Artificial Sequence
  Description of Artificial Sequence: Synthetic oligonucleotide
catgttggcccacctgagct

SEQ ID NO: 9685 - DNA, 20 bp, Artificial Sequence
  Description of Artificial Sequence: Synthetic oligonucleotide
atgttggcccacctgagctg

SEQ ID NO: 9686 - DNA, 20 bp, Artificial Sequence
  Description of Artificial Sequence: Synthetic oligonucleotide
tgttggcccacctgagctga

SEQ ID NO: 9687 - DNA, 20 bp, Artificial Sequence
  Description of Artificial Sequence: Synthetic oligonucleotide
gttggcccacctgagctgag

SEQ ID NO: 9688 - DNA, 20 bp, Artificial Sequence
  Description of Artificial Sequence: Synthetic oligonucleotide
ttggcccacctgagctgagc

SEQ ID NO: 9689 - DNA, 20 bp, Artificial Sequence
  Description of Artificial Sequence: Synthetic oligonucleotide
tggcccacctgagctgagct

SEQ ID NO: 9690 - DNA, 20 bp, Artificial Sequence
  Description of Artificial Sequence: Synthetic oligonucleotide
ggcccacctgagctgagcta

SEQ ID NO: 9691 - DNA, 20 bp, Artificial Sequence
  Description of Artificial Sequence: Synthetic oligonucleotide
gcccacctgagctgagctaa

SEQ ID NO: 9692 - DNA, 20 bp, Artificial Sequence
  Description of Artificial Sequence: Synthetic oligonucleotide
cccacctgagctgagctaac

SEQ ID NO: 9693 - DNA, 20 bp, Artificial Sequence
  Description of Artificial Sequence: Synthetic oligonucleotide
ccacctgagctgagctaacc

SEQ ID NO: 9694 - DNA, 20 bp, Artificial Sequence
  Description of Artificial Sequence: Synthetic oligonucleotide
cacctgagctgagctaacca

SEQ ID NO: 9695 - DNA, 20 bp, Artificial Sequence
  Description of Artificial Sequence: Synthetic oligonucleotide
acctgagctgagctaaccag

SEQ ID NO: 9696 - DNA, 20 bp, Artificial Sequence
  Description of Artificial Sequence: Synthetic oligonucleotide
cctgagctgagctaaccaga

SEQ ID NO: 9697 - DNA, 20 bp, Artificial Sequence
  Description of Artificial Sequence: Synthetic oligonucleotide
ctgagctgagctaaccagaa

SEQ ID NO: 9698 - DNA, 20 bp, Artificial Sequence
  Description of Artificial Sequence: Synthetic oligonucleotide
tgagctgagctaaccagaaa

SEQ ID NO: 9699 - DNA, 20 bp, Artificial Sequence
  Description of Artificial Sequence: Synthetic oligonucleotide
gagctgagctaaccagaaat

SEQ ID NO: 9700 - DNA, 20 bp, Artificial Sequence
  Description of Artificial Sequence: Synthetic oligonucleotide
agctgagctaaccagaaata

SEQ ID NO: 9701 - DNA, 20 bp, Artificial Sequence
  Description of Artificial Sequence: Synthetic oligonucleotide
gctgagctaaccagaaataa

SEQ ID NO: 9702 - DNA, 20 bp, Artificial Sequence
  Description of Artificial Sequence: Synthetic oligonucleotide
ctgagctaaccagaaataaa

SEQ ID NO: 9703 - DNA, 20 bp, Artificial Sequence
  Description of Artificial Sequence: Synthetic oligonucleotide
tgagctaaccagaaataaaa

SEQ ID NO: 9704 - DNA, 20 bp, Artificial Sequence
  Description of Artificial Sequence: Synthetic oligonucleotide
gagctaaccagaaataaaag

SEQ ID NO: 9705 - DNA, 20 bp, Artificial Sequence
  Description of Artificial Sequence: Synthetic oligonucleotide
agctaaccagaaataaaagt

SEQ ID NO: 9706 - DNA, 20 bp, Artificial Sequence
  Description of Artificial Sequence: Synthetic oligonucleotide
gctaaccagaaataaaagtt

SEQ ID NO: 9707 - DNA, 20 bp, Artificial Sequence
  Description of Artificial Sequence: Synthetic oligonucleotide
ctaaccagaaataaaagtta

SEQ ID NO: 9708 - DNA, 20 bp, Artificial Sequence
  Description of Artificial Sequence: Synthetic oligonucleotide
taaccagaaataaaagttat

SEQ ID NO: 9709 - DNA, 20 bp, Artificial Sequence
  Description of Artificial Sequence: Synthetic oligonucleotide
aaccagaaataaaagttatt

SEQ ID NO: 9710 - DNA, 20 bp, Artificial Sequence
  Description of Artificial Sequence: Synthetic oligonucleotide
accagaaataaaagttattt

SEQ ID NO: 9711 - DNA, 20 bp, Artificial Sequence
  Description of Artificial Sequence: Synthetic oligonucleotide
ccagaaataaaagttatttt

SEQ ID NO: 9712 - DNA, 20 bp, Artificial Sequence
  Description of Artificial Sequence: Synthetic oligonucleotide
cagaaataaaagttattttg

SEQ ID NO: 9713 - DNA, 20 bp, Artificial Sequence
  Description of Artificial Sequence: Synthetic oligonucleotide
agaaataaaagttattttgc

SEQ ID NO: 9714 - DNA, 20 bp, Artificial Sequence
  Description of Artificial Sequence: Synthetic oligonucleotide
gaaataaaagttattttgca

SEQ ID NO: 9715 - DNA, 20 bp, Artificial Sequence
  Description of Artificial Sequence: Synthetic oligonucleotide
aaataaaagttattttgcaa

SEQ ID NO: 9716 - DNA, 20 bp, Artificial Sequence
  Description of Artificial Sequence: Synthetic oligonucleotide
aataaaagttattttgcaaa

SEQ ID NO: 9717 - DNA, 20 bp, Artificial Sequence
  Description of Artificial Sequence: Synthetic oligonucleotide
ataaaagttattttgcaaaa

SEQ ID NO: 9718 - DNA, 20 bp, Artificial Sequence
  Description of Artificial Sequence: Synthetic oligonucleotide
taaaagttattttgcaaaag

SEQ ID NO: 9719 - DNA, 20 bp, Artificial Sequence
  Description of Artificial Sequence: Synthetic oligonucleotide
aaaagttattttgcaaaaga

SEQ ID NO: 9720 - DNA, 20 bp, Artificial Sequence
  Description of Artificial Sequence: Synthetic oligonucleotide
aaagttattttgcaaaagaa

SEQ ID NO: 9721 - DNA, 20 bp, Artificial Sequence
  Description of Artificial Sequence: Synthetic oligonucleotide
aagttattttgcaaaagaaa

SEQ ID NO: 9722 - DNA, 20 bp, Artificial Sequence
  Description of Artificial Sequence: Synthetic oligonucleotide
agttattttgcaaaagaaag

SEQ ID NO: 9723 - DNA, 20 bp, Artificial Sequence
  Description of Artificial Sequence: Synthetic oligonucleotide
gttattttgcaaaagaaaga

SEQ ID NO: 9724 - DNA, 20 bp, Artificial Sequence
  Description of Artificial Sequence: Synthetic oligonucleotide
ttattttgcaaaagaaagat

SEQ ID NO: 9725 - DNA, 20 bp, Artificial Sequence
  Description of Artificial Sequence: Synthetic oligonucleotide
tattttgcaaaagaaagatt

SEQ ID NO: 9726 - DNA, 20 bp, Artificial Sequence
  Description of Artificial Sequence: Synthetic oligonucleotide
attttgcaaaagaaagatta

SEQ ID NO: 9727 - DNA, 20 bp, Artificial Sequence
  Description of Artificial Sequence: Synthetic oligonucleotide
ttttgcaaaagaaagattaa

SEQ ID NO: 9728 - DNA, 20 bp, Artificial Sequence
  Description of Artificial Sequence: Synthetic oligonucleotide
tttgcaaaagaaagattaaa

SEQ ID NO: 9729 - DNA, 20 bp, Artificial Sequence
  Description of Artificial Sequence: Synthetic oligonucleotide
ttgcaaaagaaagattaaat

SEQ ID NO: 9730 - DNA, 20 bp, Artificial Sequence
  Description of Artificial Sequence: Synthetic oligonucleotide
tgcaaaagaaagattaaatt

SEQ ID NO: 9731 - DNA, 20 bp, Artificial Sequence
  Description of Artificial Sequence: Synthetic oligonucleotide
gcaaaagaaagattaaattt

SEQ ID NO: 9732 - DNA, 20 bp, Artificial Sequence
  Description of Artificial Sequence: Synthetic oligonucleotide
caaaagaaagattaaattta

SEQ ID NO: 9733 - DNA, 20 bp, Artificial Sequence
  Description of Artificial Sequence: Synthetic oligonucleotide
aaaagaaagattaaatttat

SEQ ID NO: 9734 - DNA, 20 bp, Artificial Sequence
  Description of Artificial Sequence: Synthetic oligonucleotide
aaagaaagattaaatttatc

SEQ ID NO: 9735 - DNA, 20 bp, Artificial Sequence
  Description of Artificial Sequence: Synthetic oligonucleotide
aagaaagattaaatttatct

SEQ ID NO: 9736 - DNA, 20 bp, Artificial Sequence
  Description of Artificial Sequence: Synthetic oligonucleotide
agaaagattaaatttatctt

SEQ ID NO: 9737 - DNA, 20 bp, Artificial Sequence
  Description of Artificial Sequence: Synthetic oligonucleotide
gaaagattaaatttatctta

SEQ ID NO: 9738 - DNA, 20 bp, Artificial Sequence
  Description of Artificial Sequence: Synthetic oligonucleotide
aaagattaaatttatcttat

SEQ ID NO: 9739 - DNA, 20 bp, Artificial Sequence
  Description of Artificial Sequence: Synthetic oligonucleotide
aagattaaatttatcttatt

SEQ ID NO: 9740 - DNA, 20 bp, Artificial Sequence
  Description of Artificial Sequence: Synthetic oligonucleotide
agattaaatttatcttattt

SEQ ID NO: 9741 - DNA, 20 bp, Artificial Sequence
  Description of Artificial Sequence: Synthetic oligonucleotide
gattaaatttatcttatttt

SEQ ID NO: 9742 - DNA, 20 bp, Artificial Sequence
  Description of Artificial Sequence: Synthetic oligonucleotide
attaaatttatcttattttt

SEQ ID NO: 9743 - DNA, 20 bp, Artificial Sequence
  Description of Artificial Sequence: Synthetic oligonucleotide
ttaaatttatcttatttttg

SEQ ID NO: 9744 - DNA, 20 bp, Artificial Sequence
  Description of Artificial Sequence: Synthetic oligonucleotide
taaatttatcttatttttgg

SEQ ID NO: 9745 - DNA, 20 bp, Artificial Sequence
  Description of Artificial Sequence: Synthetic oligonucleotide
aaatttatcttatttttggc

SEQ ID NO: 9746 - DNA, 20 bp, Artificial Sequence
  Description of Artificial Sequence: Synthetic oligonucleotide
aatttatcttatttttggcc

SEQ ID NO: 9747 - DNA, 20 bp, Artificial Sequence
  Description of Artificial Sequence: Synthetic oligonucleotide
atttatcttatttttggcct

SEQ ID NO: 9748 - DNA, 20 bp, Artificial Sequence
  Description of Artificial Sequence: Synthetic oligonucleotide
tttatcttatttttggccta

SEQ ID NO: 9749 - DNA, 20 bp, Artificial Sequence
  Description of Artificial Sequence: Synthetic oligonucleotide
ttatcttatttttggcctat

SEQ ID NO: 9750 - DNA, 20 bp, Artificial Sequence
  Description of Artificial Sequence: Synthetic oligonucleotide
tatcttatttttggcctatt

SEQ ID NO: 9751 - DNA, 20 bp, Artificial Sequence
  Description of Artificial Sequence: Synthetic oligonucleotide
atcttatttttggcctatta

SEQ ID NO: 9752 - DNA, 20 bp, Artificial Sequence
  Description of Artificial Sequence: Synthetic oligonucleotide
tcttatttttggcctattaa

SEQ ID NO: 9753 - DNA, 20 bp, Artificial Sequence
  Description of Artificial Sequence: Synthetic oligonucleotide
cttatttttggcctattaag

SEQ ID NO: 9754 - DNA, 20 bp, Artificial Sequence
  Description of Artificial Sequence: Synthetic oligonucleotide
ttatttttggcctattaagt

SEQ ID NO: 9755 - DNA, 20 bp, Artificial Sequence
  Description of Artificial Sequence: Synthetic oligonucleotide
tatttttggcctattaagtc

SEQ ID NO: 9756 - DNA, 20 bp, Artificial Sequence
  Description of Artificial Sequence: Synthetic oligonucleotide
atttttggcctattaagtct

SEQ ID NO: 9757 - DNA, 20 bp, Artificial Sequence
  Description of Artificial Sequence: Synthetic oligonucleotide
tttttggcctattaagtcta

SEQ ID NO: 9758 - DNA, 20 bp, Artificial Sequence
  Description of Artificial Sequence: Synthetic oligonucleotide
ttttggcctattaagtctat

SEQ ID NO: 9759 - DNA, 20 bp, Artificial Sequence
  Description of Artificial Sequence: Synthetic oligonucleotide
tttggcctattaagtctata

SEQ ID NO: 9760 - DNA, 20 bp, Artificial Sequence
  Description of Artificial Sequence: Synthetic oligonucleotide
ttggcctattaagtctatat

SEQ ID NO: 9761 - DNA, 20 bp, Artificial Sequence
  Description of Artificial Sequence: Synthetic oligonucleotide
tggcctattaagtctatatt

SEQ ID NO: 9762 - DNA, 20 bp, Artificial Sequence
  Description of Artificial Sequence: Synthetic oligonucleotide
ggcctattaagtctatattt

SEQ ID NO: 9763 - DNA, 20 bp, Artificial Sequence
  Description of Artificial Sequence: Synthetic oligonucleotide
gcctattaagtctatatttc

SEQ ID NO: 9764 - DNA, 20 bp, Artificial Sequence
  Description of Artificial Sequence: Synthetic oligonucleotide
cctattaagtctatatttca

SEQ ID NO: 9765 - DNA, 20 bp, Artificial Sequence
  Description of Artificial Sequence: Synthetic oligonucleotide
ctattaagtctatatttcag

SEQ ID NO: 9766 - DNA, 20 bp, Artificial Sequence
  Description of Artificial Sequence: Synthetic oligonucleotide
tattaagtctatatttcagc

SEQ ID NO: 9767 - DNA, 20 bp, Artificial Sequence
  Description of Artificial Sequence: Synthetic oligonucleotide
attaagtctatatttcagca

SEQ ID NO: 9768 - DNA, 20 bp, Artificial Sequence
  Description of Artificial Sequence: Synthetic oligonucleotide
ttaagtctatatttcagcat

SEQ ID NO: 9769 - DNA, 20 bp, Artificial Sequence
  Description of Artificial Sequence: Synthetic oligonucleotide
taagtctatatttcagcatt

SEQ ID NO: 9770 - DNA, 20 bp, Artificial Sequence
  Description of Artificial Sequence: Synthetic oligonucleotide
aagtctatatttcagcattg

SEQ ID NO: 9771 - DNA, 20 bp, Artificial Sequence
  Description of Artificial Sequence: Synthetic oligonucleotide
agtctatatttcagcattgc

SEQ ID NO: 9772 - DNA, 20 bp, Artificial Sequence
  Description of Artificial Sequence: Synthetic oligonucleotide
gtctatatttcagcattgca

SEQ ID NO: 9773 - DNA, 20 bp, Artificial Sequence
  Description of Artificial Sequence: Synthetic oligonucleotide
tctatatttcagcattgcat

SEQ ID NO: 9774 - DNA, 20 bp, Artificial Sequence
  Description of Artificial Sequence: Synthetic oligonucleotide
ctatatttcagcattgcatt

SEQ ID NO: 9775 - DNA, 20 bp, Artificial Sequence
  Description of Artificial Sequence: Synthetic oligonucleotide
tatatttcagcattgcattt

SEQ ID NO: 9776 - DNA, 20 bp, Artificial Sequence
  Description of Artificial Sequence: Synthetic oligonucleotide
atatttcagcattgcattta

SEQ ID NO: 9777 - DNA, 20 bp, Artificial Sequence
  Description of Artificial Sequence: Synthetic oligonucleotide
tatttcagcattgcatttaa

SEQ ID NO: 9778 - DNA, 20 bp, Artificial Sequence
  Description of Artificial Sequence: Synthetic oligonucleotide
atttcagcattgcatttaaa

SEQ ID NO: 9779 - DNA, 20 bp, Artificial Sequence
  Description of Artificial Sequence: Synthetic oligonucleotide
tttcagcattgcatttaaaa

SEQ ID NO: 9780 - DNA, 20 bp, Artificial Sequence
  Description of Artificial Sequence: Synthetic oligonucleotide
ttcagcattgcatttaaaaa

SEQ ID NO: 9781 - DNA, 20 bp, Artificial Sequence
  Description of Artificial Sequence: Synthetic oligonucleotide
tcagcattgcatttaaaaaa

SEQ ID NO: 9782 - DNA, 20 bp, Artificial Sequence
  Description of Artificial Sequence: Synthetic oligonucleotide
cagcattgcatttaaaaaat

SEQ ID NO: 9783 - DNA, 20 bp, Artificial Sequence
  Description of Artificial Sequence: Synthetic oligonucleotide
agcattgcatttaaaaaatc

SEQ ID NO: 9784 - DNA, 20 bp, Artificial Sequence
  Description of Artificial Sequence: Synthetic oligonucleotide
gcattgcatttaaaaaatcc

SEQ ID NO: 9785 - DNA, 20 bp, Artificial Sequence
  Description of Artificial Sequence: Synthetic oligonucleotide
cattgcatttaaaaaatcct

SEQ ID NO: 9786 - DNA, 20 bp, Artificial Sequence
  Description of Artificial Sequence: Synthetic oligonucleotide
attgcatttaaaaaatcctg

SEQ ID NO: 9787 - DNA, 20 bp, Artificial Sequence
  Description of Artificial Sequence: Synthetic oligonucleotide
ttgcatttaaaaaatcctgt

SEQ ID NO: 9788 - DNA, 20 bp, Artificial Sequence
  Description of Artificial Sequence: Synthetic oligonucleotide
tgcatttaaaaaatcctgta

SEQ ID NO: 9789 - DNA, 20 bp, Artificial Sequence
  Description of Artificial Sequence: Synthetic oligonucleotide
gcatttaaaaaatcctgtat

SEQ ID NO: 9790 - DNA, 20 bp, Artificial Sequence
  Description of Artificial Sequence: Synthetic oligonucleotide
catttaaaaaatcctgtatt

SEQ ID NO: 9791 - DNA, 20 bp, Artificial Sequence
  Description of Artificial Sequence: Synthetic oligonucleotide
atttaaaaaatcctgtattc

SEQ ID NO: 9792 - DNA, 20 bp, Artificial Sequence
  Description of Artificial Sequence: Synthetic oligonucleotide
tttaaaaaatcctgtattcg

SEQ ID NO: 9793 - DNA, 20 bp, Artificial Sequence
  Description of Artificial Sequence: Synthetic oligonucleotide
ttaaaaaatcctgtattcgg

SEQ ID NO: 9794 - DNA, 20 bp, Artificial Sequence
  Description of Artificial Sequence: Synthetic oligonucleotide
taaaaaatcctgtattcgga

SEQ ID NO: 9795 - DNA, 20 bp, Artificial Sequence
  Description of Artificial Sequence: Synthetic oligonucleotide
aaaaaatcctgtattcggag

SEQ ID NO: 9796 - DNA, 20 bp, Artificial Sequence
  Description of Artificial Sequence: Synthetic oligonucleotide
aaaaatcctgtattcggaga

SEQ ID NO: 9797 - DNA, 20 bp, Artificial Sequence
  Description of Artificial Sequence: Synthetic oligonucleotide
aaaatcctgtattcggagaa

SEQ ID NO: 9798 - DNA, 20 bp, Artificial Sequence
  Description of Artificial Sequence: Synthetic oligonucleotide
aaatcctgtattcggagaaa

SEQ ID NO: 9799 - DNA, 20 bp, Artificial Sequence
  Description of Artificial Sequence: Synthetic oligonucleotide
aatcctgtattcggagaaat

SEQ ID NO: 9800 - DNA, 20 bp, Artificial Sequence
  Description of Artificial Sequence: Synthetic oligonucleotide
atcctgtattcggagaaatt

SEQ ID NO: 9801 - DNA, 20 bp, Artificial Sequence
  Description of Artificial Sequence: Synthetic oligonucleotide
tcctgtattcggagaaattc

SEQ ID NO: 9802 - DNA, 20 bp, Artificial Sequence
  Description of Artificial Sequence: Synthetic oligonucleotide
cctgtattcggagaaattca

SEQ ID NO: 9803 - DNA, 20 bp, Artificial Sequence
  Description of Artificial Sequence: Synthetic oligonucleotide
ctgtattcggagaaattcat

SEQ ID NO: 9804 - DNA, 20 bp, Artificial Sequence
  Description of Artificial Sequence: Synthetic oligonucleotide
tgtattcggagaaattcatt

SEQ ID NO: 9805 - DNA, 20 bp, Artificial Sequence
  Description of Artificial Sequence: Synthetic oligonucleotide
gtattcggagaaattcattt

SEQ ID NO: 9806 - DNA, 20 bp, Artificial Sequence
  Description of Artificial Sequence: Synthetic oligonucleotide
tattcggagaaattcattta

SEQ ID NO: 9807 - DNA, 20 bp, Artificial Sequence
  Description of Artificial Sequence: Synthetic oligonucleotide
attcggagaaattcatttaa

SEQ ID NO: 9808 - DNA, 20 bp, Artificial Sequence
  Description of Artificial Sequence: Synthetic oligonucleotide
ttcggagaaattcatttaag

SEQ ID NO: 9809 - DNA, 20 bp, Artificial Sequence
  Description of Artificial Sequence: Synthetic oligonucleotide
tcggagaaattcatttaaga

SEQ ID NO: 9810 - DNA, 20 bp, Artificial Sequence
  Description of Artificial Sequence: Synthetic oligonucleotide
cggagaaattcatttaagac

SEQ ID NO: 9811 - DNA, 20 bp, Artificial Sequence
  Description of Artificial Sequence: Synthetic oligonucleotide
ggagaaattcatttaagacc

SEQ ID NO: 9812 - DNA, 20 bp, Artificial Sequence
  Description of Artificial Sequence: Synthetic oligonucleotide
gagaaattcatttaagacca

SEQ ID NO: 9813 - DNA, 20 bp, Artificial Sequence
  Description of Artificial Sequence: Synthetic oligonucleotide
agaaattcatttaagaccat

SEQ ID NO: 9814 - DNA, 20 bp, Artificial Sequence
  Description of Artificial Sequence: Synthetic oligonucleotide
gaaattcatttaagaccatg

SEQ ID NO: 9815 - DNA, 20 bp, Artificial Sequence
  Description of Artificial Sequence: Synthetic oligonucleotide
aaattcatttaagaccatgg

SEQ ID NO: 9816 - DNA, 20 bp, Artificial Sequence
  Description of Artificial Sequence: Synthetic oligonucleotide
aattcatttaagaccatgga

SEQ ID NO: 9817 - DNA, 20 bp, Artificial Sequence
  Description of Artificial Sequence: Synthetic oligonucleotide
attcatttaagaccatggaa

SEQ ID NO: 9818 - DNA, 20 bp, Artificial Sequence
  Description of Artificial Sequence: Synthetic oligonucleotide
ttcatttaagaccatggaaa

SEQ ID NO: 9819 - DNA, 20 bp, Artificial Sequence
  Description of Artificial Sequence: Synthetic oligonucleotide
tcatttaagaccatggaaaa

SEQ ID NO: 9820 - DNA, 20 bp, Artificial Sequence
  Description of Artificial Sequence: Synthetic oligonucleotide
catttaagaccatggaaaaa

SEQ ID NO: 9821 - DNA, 20 bp, Artificial Sequence
  Description of Artificial Sequence: Synthetic oligonucleotide
atttaagaccatggaaaaaa

SEQ ID NO: 9822 - DNA, 20 bp, Artificial Sequence
  Description of Artificial Sequence: Synthetic oligonucleotide
tttaagaccatggaaaaaaa

SEQ ID NO: 9823 - DNA, 20 bp, Artificial Sequence
  Description of Artificial Sequence: Synthetic oligonucleotide
ttaagaccatggaaaaaaat

SEQ ID NO: 9824 - DNA, 20 bp, Artificial Sequence
  Description of Artificial Sequence: Synthetic oligonucleotide
taagaccatggaaaaaaata

SEQ ID NO: 9825 - DNA, 20 bp, Artificial Sequence
  Description of Artificial Sequence: Synthetic oligonucleotide
aagaccatggaaaaaaatag

SEQ ID NO: 9826 - DNA, 20 bp, Artificial Sequence
  Description of Artificial Sequence: Synthetic oligonucleotide
agaccatggaaaaaaataga

SEQ ID NO: 9827 - DNA, 20 bp, Artificial Sequence
  Description of Artificial Sequence: Synthetic oligonucleotide
gaccatggaaaaaaatagac

SEQ ID NO: 9828 - DNA, 20 bp, Artificial Sequence
  Description of Artificial Sequence: Synthetic oligonucleotide
accatggaaaaaaatagacg

SEQ ID NO: 9829 - DNA, 20 bp, Artificial Sequence
  Description of Artificial Sequence: Synthetic oligonucleotide
ccatggaaaaaaatagacgt

SEQ ID NO: 9830 - DNA, 20 bp, Artificial Sequence
  Description of Artificial Sequence: Synthetic oligonucleotide
catggaaaaaaatagacgta

SEQ ID NO: 9831 - DNA, 20 bp, Artificial Sequence
  Description of Artificial Sequence: Synthetic oligonucleotide
atggaaaaaaatagacgtat

SEQ ID NO: 9832 - DNA, 20 bp, Artificial Sequence
  Description of Artificial Sequence: Synthetic oligonucleotide
tggaaaaaaatagacgtatc

SEQ ID NO: 9833 - DNA, 20 bp, Artificial Sequence
  Description of Artificial Sequence: Synthetic oligonucleotide
ggaaaaaaatagacgtatca

SEQ ID NO: 9834 - DNA, 20 bp, Artificial Sequence
  Description of Artificial Sequence: Synthetic oligonucleotide
gaaaaaaatagacgtatcac

SEQ ID NO: 9835 - DNA, 20 bp, Artificial Sequence
  Description of Artificial Sequence: Synthetic oligonucleotide
aaaaaaatagacgtatcaca

SEQ ID NO: 9836 - DNA, 20 bp, Artificial Sequence
  Description of Artificial Sequence: Synthetic oligonucleotide
aaaaaatagacgtatcacaa

SEQ ID NO: 9837 - DNA, 20 bp, Artificial Sequence
  Description of Artificial Sequence: Synthetic oligonucleotide
aaaaatagacgtatcacaat

SEQ ID NO: 9838 - DNA, 20 bp, Artificial Sequence
  Description of Artificial Sequence: Synthetic oligonucleotide
aaaatagacgtatcacaatt

SEQ ID NO: 9839 - DNA, 20 bp, Artificial Sequence
  Description of Artificial Sequence: Synthetic oligonucleotide
aaatagacgtatcacaattg

SEQ ID NO: 9840 - DNA, 20 bp, Artificial Sequence
  Description of Artificial Sequence: Synthetic oligonucleotide
aatagacgtatcacaattga

SEQ ID NO: 9841 - DNA, 20 bp, Artificial Sequence
  Description of Artificial Sequence: Synthetic oligonucleotide
atagacgtatcacaattgag

SEQ ID NO: 9842 - DNA, 20 bp, Artificial Sequence
  Description of Artificial Sequence: Synthetic oligonucleotide
tagacgtatcacaattgagg

SEQ ID NO: 9843 - DNA, 20 bp, Artificial Sequence
  Description of Artificial Sequence: Synthetic oligonucleotide
agacgtatcacaattgagga

SEQ ID NO: 9844 - DNA, 20 bp, Artificial Sequence
  Description of Artificial Sequence: Synthetic oligonucleotide
gacgtatcacaattgaggaa

SEQ ID NO: 9845 - DNA, 20 bp, Artificial Sequence
  Description of Artificial Sequence: Synthetic oligonucleotide
acgtatcacaattgaggaac

SEQ ID NO: 9846 - DNA, 20 bp, Artificial Sequence
  Description of Artificial Sequence: Synthetic oligonucleotide
cgtatcacaattgaggaacc

SEQ ID NO: 9847 - DNA, 20 bp, Artificial Sequence
  Description of Artificial Sequence: Synthetic oligonucleotide
gtatcacaattgaggaacct

SEQ ID NO: 9848 - DNA, 20 bp, Artificial Sequence
  Description of Artificial Sequence: Synthetic oligonucleotide
tatcacaattgaggaacctt

SEQ ID NO: 9849 - DNA, 20 bp, Artificial Sequence
  Description of Artificial Sequence: Synthetic oligonucleotide
atcacaattgaggaacctta

SEQ ID NO: 9850 - DNA, 20 bp, Artificial Sequence
  Description of Artificial Sequence: Synthetic oligonucleotide
tcacaattgaggaaccttaa

SEQ ID NO: 9851 - DNA, 20 bp, Artificial Sequence
  Description of Artificial Sequence: Synthetic oligonucleotide
cacaattgaggaaccttaag

SEQ ID NO: 9852 - DNA, 20 bp, Artificial Sequence
  Description of Artificial Sequence: Synthetic oligonucleotide
acaattgaggaaccttaagg

SEQ ID NO: 9853 - DNA, 20 bp, Artificial Sequence
  Description of Artificial Sequence: Synthetic oligonucleotide
caattgaggaaccttaagga

SEQ ID NO: 9854 - DNA, 20 bp, Artificial Sequence
  Description of Artificial Sequence: Synthetic oligonucleotide
aattgaggaaccttaaggag

SEQ ID NO: 9855 - DNA, 20 bp, Artificial Sequence
  Description of Artificial Sequence: Synthetic oligonucleotide
attgaggaaccttaaggagc

SEQ ID NO: 9856 - DNA, 20 bp, Artificial Sequence
  Description of Artificial Sequence: Synthetic oligonucleotide
ttgaggaaccttaaggagcc

SEQ ID NO: 9857 - DNA, 20 bp, Artificial Sequence
  Description of Artificial Sequence: Synthetic oligonucleotide
tgaggaaccttaaggagccg

SEQ ID NO: 9858 - DNA, 20 bp, Artificial Sequence
  Description of Artificial Sequence: Synthetic oligonucleotide
gaggaaccttaaggagccgc

SEQ ID NO: 9859 - DNA, 20 bp, Artificial Sequence
  Description of Artificial Sequence: Synthetic oligonucleotide
aggaaccttaaggagccgca

SEQ ID NO: 9860 - DNA, 20 bp, Artificial Sequence
  Description of Artificial Sequence: Synthetic oligonucleotide
ggaaccttaaggagccgcat

SEQ ID NO: 9861 - DNA, 20 bp, Artificial Sequence
  Description of Artificial Sequence: Synthetic oligonucleotide
gaaccttaaggagccgcatc

SEQ ID NO: 9862 - DNA, 20 bp, Artificial Sequence
  Description of Artificial Sequence: Synthetic oligonucleotide
aaccttaaggagccgcatcc

SEQ ID NO: 9863 - DNA, 20 bp, Artificial Sequence
  Description of Artificial Sequence: Synthetic oligonucleotide
accttaaggagccgcatcct

SEQ ID NO: 9864 - DNA, 20 bp, Artificial Sequence
  Description of Artificial Sequence: Synthetic oligonucleotide
ccttaaggagccgcatcctt

SEQ ID NO: 9865 - DNA, 20 bp, Artificial Sequence
  Description of Artificial Sequence: Synthetic oligonucleotide
cttaaggagccgcatccttc

SEQ ID NO: 9866 - DNA, 20 bp, Artificial Sequence
  Description of Artificial Sequence: Synthetic oligonucleotide
ttaaggagccgcatccttcc

SEQ ID NO: 9867 - DNA, 20 bp, Artificial Sequence
  Description of Artificial Sequence: Synthetic oligonucleotide
taaggagccgcatccttcct

SEQ ID NO: 9868 - DNA, 20 bp, Artificial Sequence
  Description of Artificial Sequence: Synthetic oligonucleotide
aaggagccgcatccttcctg

SEQ ID NO: 9869 - DNA, 20 bp, Artificial Sequence
  Description of Artificial Sequence: Synthetic oligonucleotide
aggagccgcatccttcctga

SEQ ID NO: 9870 - DNA, 20 bp, Artificial Sequence
  Description of Artificial Sequence: Synthetic oligonucleotide
ggagccgcatccttcctgaa

SEQ ID NO: 9871 - DNA, 20 bp, Artificial Sequence
  Description of Artificial Sequence: Synthetic oligonucleotide
gagccgcatccttcctgaac

SEQ ID NO: 9872 - DNA, 20 bp, Artificial Sequence
  Description of Artificial Sequence: Synthetic oligonucleotide
agccgcatccttcctgaaca

SEQ ID NO: 9873 - DNA, 20 bp, Artificial Sequence
  Description of Artificial Sequence: Synthetic oligonucleotide
gccgcatccttcctgaacac

SEQ ID NO: 9874 - DNA, 20 bp, Artificial Sequence
  Description of Artificial Sequence: Synthetic oligonucleotide
ccgcatccttcctgaacaca

SEQ ID NO: 9875 - DNA, 20 bp, Artificial Sequence
  Description of Artificial Sequence: Synthetic oligonucleotide
cgcatccttcctgaacacaa

SEQ ID NO: 9876 - DNA, 20 bp, Artificial Sequence
  Description of Artificial Sequence: Synthetic oligonucleotide
gcatccttcctgaacacaaa

SEQ ID NO: 9877 - DNA, 20 bp, Artificial Sequence
  Description of Artificial Sequence: Synthetic oligonucleotide
catccttcctgaacacaaag

SEQ ID NO: 9878 - DNA, 20 bp, Artificial Sequence
  Description of Artificial Sequence: Synthetic oligonucleotide
atccttcctgaacacaaagg

SEQ ID NO: 9879 - DNA, 20 bp, Artificial Sequence
  Description of Artificial Sequence: Synthetic oligonucleotide
tccttcctgaacacaaaggg

SEQ ID NO: 9880 - DNA, 20 bp, Artificial Sequence
  Description of Artificial Sequence: Synthetic oligonucleotide
ccttcctgaacacaaaggga

SEQ ID NO: 9881 - DNA, 20 bp, Artificial Sequence
  Description of Artificial Sequence: Synthetic oligonucleotide
cttcctgaacacaaagggac

SEQ ID NO: 9882 - DNA, 20 bp, Artificial Sequence
  Description of Artificial Sequence: Synthetic oligonucleotide
ttcctgaacacaaagggact

SEQ ID NO: 9883 - DNA, 20 bp, Artificial Sequence
  Description of Artificial Sequence: Synthetic oligonucleotide
tcctgaacacaaagggactc

SEQ ID NO: 9884 - DNA, 20 bp, Artificial Sequence
  Description of Artificial Sequence: Synthetic oligonucleotide
cctgaacacaaagggactct

SEQ ID NO: 9885 - DNA, 20 bp, Artificial Sequence
  Description of Artificial Sequence: Synthetic oligonucleotide
ctgaacacaaagggactctt

SEQ ID NO: 9886 - DNA, 20 bp, Artificial Sequence
  Description of Artificial Sequence: Synthetic oligonucleotide
tgaacacaaagggactcttc

SEQ ID NO: 9887 - DNA, 20 bp, Artificial Sequence
  Description of Artificial Sequence: Synthetic oligonucleotide
gaacacaaagggactcttca

SEQ ID NO: 9888 - DNA, 20 bp, Artificial Sequence
  Description of Artificial Sequence: Synthetic oligonucleotide
aacacaaagggactcttcac

SEQ ID NO: 9889 - DNA, 20 bp, Artificial Sequence
  Description of Artificial Sequence: Synthetic oligonucleotide
acacaaagggactcttcaca

SEQ ID NO: 9890 - DNA, 20 bp, Artificial Sequence
  Description of Artificial Sequence: Synthetic oligonucleotide
cacaaagggactcttcacat

SEQ ID NO: 9891 - DNA, 20 bp, Artificial Sequence
  Description of Artificial Sequence: Synthetic oligonucleotide
acaaagggactcttcacatg

SEQ ID NO: 9892 - DNA, 20 bp, Artificial Sequence
  Description of Artificial Sequence: Synthetic oligonucleotide
caaagggactcttcacatgg

SEQ ID NO: 9893 - DNA, 20 bp, Artificial Sequence
  Description of Artificial Sequence: Synthetic oligonucleotide
aaagggactcttcacatggt

SEQ ID NO: 9894 - DNA, 20 bp, Artificial Sequence
  Description of Artificial Sequence: Synthetic oligonucleotide
aagggactcttcacatggtt

SEQ ID NO: 9895 - DNA, 20 bp, Artificial Sequence
  Description of Artificial Sequence: Synthetic oligonucleotide
agggactcttcacatggtta

SEQ ID NO: 9896 - DNA, 20 bp, Artificial Sequence
  Description of Artificial Sequence: Synthetic oligonucleotide
gggactcttcacatggttat

SEQ ID NO: 9897 - DNA, 20 bp, Artificial Sequence
  Description of Artificial Sequence: Synthetic oligonucleotide
ggactcttcacatggttatg

SEQ ID NO: 9898 - DNA, 20 bp, Artificial Sequence
  Description of Artificial Sequence: Synthetic oligonucleotide
gactcttcacatggttatgt

SEQ ID NO: 9899 - DNA, 20 bp, Artificial Sequence
  Description of Artificial Sequence: Synthetic oligonucleotide
actcttcacatggttatgtg

SEQ ID NO: 9900 - DNA, 20 bp, Artificial Sequence
  Description of Artificial Sequence: Synthetic oligonucleotide
ctcttcacatggttatgtgt

SEQ ID NO: 9901 - DNA, 20 bp, Artificial Sequence
  Description of Artificial Sequence: Synthetic oligonucleotide
tcttcacatggttatgtgtc

SEQ ID NO: 9902 - DNA, 20 bp, Artificial Sequence
  Description of Artificial Sequence: Synthetic oligonucleotide
cttcacatggttatgtgtct

SEQ ID NO: 9903 - DNA, 20 bp, Artificial Sequence
  Description of Artificial Sequence: Synthetic oligonucleotide
ttcacatggttatgtgtctc

SEQ ID NO: 9904 - DNA, 20 bp, Artificial Sequence
  Description of Artificial Sequence: Synthetic oligonucleotide
tcacatggttatgtgtctct

SEQ ID NO: 9905 - DNA, 20 bp, Artificial Sequence
  Description of Artificial Sequence: Synthetic oligonucleotide
cacatggttatgtgtctcta

SEQ ID NO: 9906 - DNA, 20 bp, Artificial Sequence
  Description of Artificial Sequence: Synthetic oligonucleotide
acatggttatgtgtctctac

SEQ ID NO: 9907 - DNA, 20 bp, Artificial Sequence
  Description of Artificial Sequence: Synthetic oligonucleotide
catggttatgtgtctctaca

SEQ ID NO: 9908 - DNA, 20 bp, Artificial Sequence
  Description of Artificial Sequence: Synthetic oligonucleotide
atggttatgtgtctctacac

SEQ ID NO: 9909 - DNA, 20 bp, Artificial Sequence
  Description of Artificial Sequence: Synthetic oligonucleotide
tggttatgtgtctctacact

SEQ ID NO: 9910 - DNA, 20 bp, Artificial Sequence
  Description of Artificial Sequence: Synthetic oligonucleotide
ggttatgtgtctctacactt

SEQ ID NO: 9911 - DNA, 20 bp, Artificial Sequence
  Description of Artificial Sequence: Synthetic oligonucleotide
gttatgtgtctctacactta

SEQ ID NO: 9912 - DNA, 20 bp, Artificial Sequence
  Description of Artificial Sequence: Synthetic oligonucleotide
ttatgtgtctctacacttaa

SEQ ID NO: 9913 - DNA, 20 bp, Artificial Sequence
  Description of Artificial Sequence: Synthetic oligonucleotide
tatgtgtctctacacttaac

SEQ ID NO: 9914 - DNA, 20 bp, Artificial Sequence
  Description of Artificial Sequence: Synthetic oligonucleotide
atgtgtctctacacttaact

SEQ ID NO: 9915 - DNA, 20 bp, Artificial Sequence
  Description of Artificial Sequence: Synthetic oligonucleotide
tgtgtctctacacttaactc

SEQ ID NO: 9916 - DNA, 20 bp, Artificial Sequence
  Description of Artificial Sequence: Synthetic oligonucleotide
gtgtctctacacttaactct

SEQ ID NO: 9917 - DNA, 20 bp, Artificial Sequence
  Description of Artificial Sequence: Synthetic oligonucleotide
tgtctctacacttaactctg

SEQ ID NO: 9918 - DNA, 20 bp, Artificial Sequence
  Description of Artificial Sequence: Synthetic oligonucleotide
gtctctacacttaactctga

SEQ ID NO: 9919 - DNA, 20 bp, Artificial Sequence
  Description of Artificial Sequence: Synthetic oligonucleotide
tctctacacttaactctgag

SEQ ID NO: 9920 - DNA, 20 bp, Artificial Sequence
  Description of Artificial Sequence: Synthetic oligonucleotide
ctctacacttaactctgagc

SEQ ID NO: 9921 - DNA, 20 bp, Artificial Sequence
  Description of Artificial Sequence: Synthetic oligonucleotide
tctacacttaactctgagcc

SEQ ID NO: 9922 - DNA, 20 bp, Artificial Sequence
  Description of Artificial Sequence: Synthetic oligonucleotide
ctacacttaactctgagcca

SEQ ID NO: 9923 - DNA, 20 bp, Artificial Sequence
  Description of Artificial Sequence: Synthetic oligonucleotide
tacacttaactctgagccaa

SEQ ID NO: 9924 - DNA, 20 bp, Artificial Sequence
  Description of Artificial Sequence: Synthetic oligonucleotide
acacttaactctgagccaat

SEQ ID NO: 9925 - DNA, 20 bp, Artificial Sequence
  Description of Artificial Sequence: Synthetic oligonucleotide
cacttaactctgagccaatg

SEQ ID NO: 9926 - DNA, 20 bp, Artificial Sequence
  Description of Artificial Sequence: Synthetic oligonucleotide
acttaactctgagccaatga

SEQ ID NO: 9927 - DNA, 20 bp, Artificial Sequence
  Description of Artificial Sequence: Synthetic oligonucleotide
cttaactctgagccaatgag

SEQ ID NO: 9928 - DNA, 20 bp, Artificial Sequence
  Description of Artificial Sequence: Synthetic oligonucleotide
ttaactctgagccaatgaga

SEQ ID NO: 9929 - DNA, 20 bp, Artificial Sequence
  Description of Artificial Sequence: Synthetic oligonucleotide
taactctgagccaatgagaa

SEQ ID NO: 9930 - DNA, 20 bp, Artificial Sequence
  Description of Artificial Sequence: Synthetic oligonucleotide
aactctgagccaatgagaag

SEQ ID NO: 9931 - DNA, 20 bp, Artificial Sequence
  Description of Artificial Sequence: Synthetic oligonucleotide
actctgagccaatgagaaga

SEQ ID NO: 9932 - DNA, 20 bp, Artificial Sequence
  Description of Artificial Sequence: Synthetic oligonucleotide
ctctgagccaatgagaagag

SEQ ID NO: 9933 - DNA, 20 bp, Artificial Sequence
  Description of Artificial Sequence: Synthetic oligonucleotide
tctgagccaatgagaagagt

SEQ ID NO: 9934 - DNA, 20 bp, Artificial Sequence
  Description of Artificial Sequence: Synthetic oligonucleotide
ctgagccaatgagaagagtt

SEQ ID NO: 9935 - DNA, 20 bp, Artificial Sequence
  Description of Artificial Sequence: Synthetic oligonucleotide
tgagccaatgagaagagtta

SEQ ID NO: 9936 - DNA, 20 bp, Artificial Sequence
  Description of Artificial Sequence: Synthetic oligonucleotide
gagccaatgagaagagttac

SEQ ID NO: 9937 - DNA, 20 bp, Artificial Sequence
  Description of Artificial Sequence: Synthetic oligonucleotide
agccaatgagaagagttacg

SEQ ID NO: 9938 - DNA, 20 bp, Artificial Sequence
  Description of Artificial Sequence: Synthetic oligonucleotide
gccaatgagaagagttacgt

SEQ ID NO: 9939 - DNA, 20 bp, Artificial Sequence
  Description of Artificial Sequence: Synthetic oligonucleotide
ccaatgagaagagttacgtt

SEQ ID NO: 9940 - DNA, 20 bp, Artificial Sequence
  Description of Artificial Sequence: Synthetic oligonucleotide
caatgagaagagttacgttt

SEQ ID NO: 9941 - DNA, 20 bp, Artificial Sequence
  Description of Artificial Sequence: Synthetic oligonucleotide
aatgagaagagttacgttta

SEQ ID NO: 9942 - DNA, 20 bp, Artificial Sequence
  Description of Artificial Sequence: Synthetic oligonucleotide
atgagaagagttacgtttac

SEQ ID NO: 9943 - DNA, 20 bp, Artificial Sequence
  Description of Artificial Sequence: Synthetic oligonucleotide
tgagaagagttacgtttaca

SEQ ID NO: 9944 - DNA, 20 bp, Artificial Sequence
  Description of Artificial Sequence: Synthetic oligonucleotide
gagaagagttacgtttacag

SEQ ID NO: 9945 - DNA, 20 bp, Artificial Sequence
  Description of Artificial Sequence: Synthetic oligonucleotide
agaagagttacgtttacaga

SEQ ID NO: 9946 - DNA, 20 bp, Artificial Sequence
  Description of Artificial Sequence: Synthetic oligonucleotide
gaagagttacgtttacagag

SEQ ID NO: 9947 - DNA, 20 bp, Artificial Sequence
  Description of Artificial Sequence: Synthetic oligonucleotide
aagagttacgtttacagaga

SEQ ID NO: 9948 - DNA, 20 bp, Artificial Sequence
  Description of Artificial Sequence: Synthetic oligonucleotide
agagttacgtttacagagag

SEQ ID NO: 9949 - DNA, 20 bp, Artificial Sequence
  Description of Artificial Sequence: Synthetic oligonucleotide
gagttacgtttacagagaga

SEQ ID NO: 9950 - DNA, 20 bp, Artificial Sequence
  Description of Artificial Sequence: Synthetic oligonucleotide
agttacgtttacagagagag

SEQ ID NO: 9951 - DNA, 20 bp, Artificial Sequence
  Description of Artificial Sequence: Synthetic oligonucleotide
gttacgtttacagagagagg

SEQ ID NO: 9952 - DNA, 20 bp, Artificial Sequence
  Description of Artificial Sequence: Synthetic oligonucleotide
ttacgtttacagagagagga

SEQ ID NO: 9953 - DNA, 20 bp, Artificial Sequence
  Description of Artificial Sequence: Synthetic oligonucleotide
tacgtttacagagagaggac

SEQ ID NO: 9954 - DNA, 20 bp, Artificial Sequence
  Description of Artificial Sequence: Synthetic oligonucleotide
acgtttacagagagaggaca

SEQ ID NO: 9955 - DNA, 20 bp, Artificial Sequence
  Description of Artificial Sequence: Synthetic oligonucleotide
cgtttacagagagaggacac

SEQ ID NO: 9956 - DNA, 20 bp, Artificial Sequence
  Description of Artificial Sequence: Synthetic oligonucleotide
gtttacagagagaggacaca

SEQ ID NO: 9957 - DNA, 20 bp, Artificial Sequence
  Description of Artificial Sequence: Synthetic oligonucleotide
tttacagagagaggacacaa

SEQ ID NO: 9958 - DNA, 20 bp, Artificial Sequence
  Description of Artificial Sequence: Synthetic oligonucleotide
ttacagagagaggacacaaa

SEQ ID NO: 9959 - DNA, 20 bp, Artificial Sequence
  Description of Artificial Sequence: Synthetic oligonucleotide
tacagagagaggacacaaaa

SEQ ID NO: 9960 - DNA, 20 bp, Artificial Sequence
  Description of Artificial Sequence: Synthetic oligonucleotide
acagagagaggacacaaaat

SEQ ID NO: 9961 - DNA, 20 bp, Artificial Sequence
  Description of Artificial Sequence: Synthetic oligonucleotide
cagagagaggacacaaaatt

SEQ ID NO: 9962 - DNA, 20 bp, Artificial Sequence
  Description of Artificial Sequence: Synthetic oligonucleotide
agagagaggacacaaaattc

SEQ ID NO: 9963 - DNA, 20 bp, Artificial Sequence
  Description of Artificial Sequence: Synthetic oligonucleotide
gagagaggacacaaaattcc

SEQ ID NO: 9964 - DNA, 20 bp, Artificial Sequence
  Description of Artificial Sequence: Synthetic oligonucleotide
agagaggacacaaaattcca

SEQ ID NO: 9965 - DNA, 20 bp, Artificial Sequence
  Description of Artificial Sequence: Synthetic oligonucleotide
gagaggacacaaaattccat

SEQ ID NO: 9966 - DNA, 20 bp, Artificial Sequence
  Description of Artificial Sequence: Synthetic oligonucleotide
agaggacacaaaattccatt

SEQ ID NO: 9967 - DNA, 20 bp, Artificial Sequence
  Description of Artificial Sequence: Synthetic oligonucleotide
gaggacacaaaattccatta

SEQ ID NO: 9968 - DNA, 20 bp, Artificial Sequence
  Description of Artificial Sequence: Synthetic oligonucleotide
aggacacaaaattccattaa

SEQ ID NO: 9969 - DNA, 20 bp, Artificial Sequence
  Description of Artificial Sequence: Synthetic oligonucleotide
ggacacaaaattccattaat

SEQ ID NO: 9970 - DNA, 20 bp, Artificial Sequence
  Description of Artificial Sequence: Synthetic oligonucleotide
gacacaaaattccattaatg

SEQ ID NO: 9971 - DNA, 20 bp, Artificial Sequence
  Description of Artificial Sequence: Synthetic oligonucleotide
acacaaaattccattaatgc

SEQ ID NO: 9972 - DNA, 20 bp, Artificial Sequence
  Description of Artificial Sequence: Synthetic oligonucleotide
cacaaaattccattaatgct

SEQ ID NO: 9973 - DNA, 20 bp, Artificial Sequence
  Description of Artificial Sequence: Synthetic oligonucleotide
acaaaattccattaatgctc

SEQ ID NO: 9974 - DNA, 20 bp, Artificial Sequence
  Description of Artificial Sequence: Synthetic oligonucleotide
caaaattccattaatgctca

SEQ ID NO: 9975 - DNA, 20 bp, Artificial Sequence
  Description of Artificial Sequence: Synthetic oligonucleotide
aaaattccattaatgctcat

SEQ ID NO: 9976 - DNA, 20 bp, Artificial Sequence
  Description of Artificial Sequence: Synthetic oligonucleotide
aaattccattaatgctcatt

SEQ ID NO: 9977 - DNA, 20 bp, Artificial Sequence
  Description of Artificial Sequence: Synthetic oligonucleotide
aattccattaatgctcattc

SEQ ID NO: 9978 - DNA, 20 bp, Artificial Sequence
  Description of Artificial Sequence: Synthetic oligonucleotide
attccattaatgctcattcc

SEQ ID NO: 9979 - DNA, 20 bp, Artificial Sequence
  Description of Artificial Sequence: Synthetic oligonucleotide
ttccattaatgctcattcct

SEQ ID NO: 9980 - DNA, 20 bp, Artificial Sequence
  Description of Artificial Sequence: Synthetic oligonucleotide
tccattaatgctcattcctg

SEQ ID NO: 9981 - DNA, 20 bp, Artificial Sequence
  Description of Artificial Sequence: Synthetic oligonucleotide
ccattaatgctcattcctgg

SEQ ID NO: 9982 - DNA, 20 bp, Artificial Sequence
  Description of Artificial Sequence: Synthetic oligonucleotide
cattaatgctcattcctggt

SEQ ID NO: 9983 - DNA, 20 bp, Artificial Sequence
  Description of Artificial Sequence: Synthetic oligonucleotide
attaatgctcattcctggta

SEQ ID NO: 9984 - DNA, 20 bp, Artificial Sequence
  Description of Artificial Sequence: Synthetic oligonucleotide
ttaatgctcattcctggtaa

SEQ ID NO: 9985 - DNA, 20 bp, Artificial Sequence
  Description of Artificial Sequence: Synthetic oligonucleotide
taatgctcattcctggtaaa

SEQ ID NO: 9986 - DNA, 20 bp, Artificial Sequence
  Description of Artificial Sequence: Synthetic oligonucleotide
aatgctcattcctggtaaat

SEQ ID NO: 9987 - DNA, 20 bp, Artificial Sequence
  Description of Artificial Sequence: Synthetic oligonucleotide
atgctcattcctggtaaatc

SEQ ID NO: 9988 - DNA, 20 bp, Artificial Sequence
  Description of Artificial Sequence: Synthetic oligonucleotide
tgctcattcctggtaaatct

SEQ ID NO: 9989 - DNA, 20 bp, Artificial Sequence
  Description of Artificial Sequence: Synthetic oligonucleotide
gctcattcctggtaaatctt

SEQ ID NO: 9990 - DNA, 20 bp, Artificial Sequence
  Description of Artificial Sequence: Synthetic oligonucleotide
ctcattcctggtaaatctta

SEQ ID NO: 9991 - DNA, 20 bp, Artificial Sequence
  Description of Artificial Sequence: Synthetic oligonucleotide
tcattcctggtaaatcttag

SEQ ID NO: 9992 - DNA, 20 bp, Artificial Sequence
  Description of Artificial Sequence: Synthetic oligonucleotide
cattcctggtaaatcttagg

SEQ ID NO: 9993 - DNA, 20 bp, Artificial Sequence
  Description of Artificial Sequence: Synthetic oligonucleotide
attcctggtaaatcttagga

SEQ ID NO: 9994 - DNA, 20 bp, Artificial Sequence
  Description of Artificial Sequence: Synthetic oligonucleotide
ttcctggtaaatcttaggaa

SEQ ID NO: 9995 - DNA, 20 bp, Artificial Sequence
  Description of Artificial Sequence: Synthetic oligonucleotide
tcctggtaaatcttaggaac

SEQ ID NO: 9996 - DNA, 20 bp, Artificial Sequence
  Description of Artificial Sequence: Synthetic oligonucleotide
cctggtaaatcttaggaaca

SEQ ID NO: 9997 - DNA, 20 bp, Artificial Sequence
  Description of Artificial Sequence: Synthetic oligonucleotide
ctggtaaatcttaggaacac

SEQ ID NO: 9998 - DNA, 20 bp, Artificial Sequence
  Description of Artificial Sequence: Synthetic oligonucleotide
tggtaaatcttaggaacacc

SEQ ID NO: 9999 - DNA, 20 bp, Artificial Sequence
  Description of Artificial Sequence: Synthetic oligonucleotide
ggtaaatcttaggaacacca

SEQ ID NO: 10000 - DNA, 20 bp, Artificial Sequence
  Description of Artificial Sequence: Synthetic oligonucleotide
gtaaatcttaggaacaccag

SEQ ID NO: 10001 - DNA, 20 bp, Artificial Sequence
  Description of Artificial Sequence: Synthetic oligonucleotide
taaatcttaggaacaccaga

SEQ ID NO: 10002 - DNA, 20 bp, Artificial Sequence
  Description of Artificial Sequence: Synthetic oligonucleotide
aaatcttaggaacaccagag

SEQ ID NO: 10003 - DNA, 20 bp, Artificial Sequence
  Description of Artificial Sequence: Synthetic oligonucleotide
aatcttaggaacaccagaga

SEQ ID NO: 10004 - DNA, 20 bp, Artificial Sequence
  Description of Artificial Sequence: Synthetic oligonucleotide
atcttaggaacaccagagaa

SEQ ID NO: 10005 - DNA, 20 bp, Artificial Sequence
  Description of Artificial Sequence: Synthetic oligonucleotide
tcttaggaacaccagagaac

SEQ ID NO: 10006 - DNA, 20 bp, Artificial Sequence
  Description of Artificial Sequence: Synthetic oligonucleotide
cttaggaacaccagagaact

SEQ ID NO: 10007 - DNA, 20 bp, Artificial Sequence
  Description of Artificial Sequence: Synthetic oligonucleotide
ttaggaacaccagagaactg

SEQ ID NO: 10008 - DNA, 20 bp, Artificial Sequence
  Description of Artificial Sequence: Synthetic oligonucleotide
taggaacaccagagaactgt

SEQ ID NO: 10009 - DNA, 20 bp, Artificial Sequence
  Description of Artificial Sequence: Synthetic oligonucleotide
aggaacaccagagaactgtt

SEQ ID NO: 10010 - DNA, 20 bp, Artificial Sequence
  Description of Artificial Sequence: Synthetic oligonucleotide
ggaacaccagagaactgttt

SEQ ID NO: 10011 - DNA, 20 bp, Artificial Sequence
  Description of Artificial Sequence: Synthetic oligonucleotide
gaacaccagagaactgtttc

SEQ ID NO: 10012 - DNA, 20 bp, Artificial Sequence
  Description of Artificial Sequence: Synthetic oligonucleotide
aacaccagagaactgtttct

SEQ ID NO: 10013 - DNA, 20 bp, Artificial Sequence
  Description of Artificial Sequence: Synthetic oligonucleotide
acaccagagaactgtttctg

SEQ ID NO: 10014 - DNA, 20 bp, Artificial Sequence
  Description of Artificial Sequence: Synthetic oligonucleotide
caccagagaactgtttctgg

SEQ ID NO: 10015 - DNA, 20 bp, Artificial Sequence
  Description of Artificial Sequence: Synthetic oligonucleotide
accagagaactgtttctggc

SEQ ID NO: 10016 - DNA, 20 bp, Artificial Sequence
  Description of Artificial Sequence: Synthetic oligonucleotide
ccagagaactgtttctggca

SEQ ID NO: 10017 - DNA, 20 bp, Artificial Sequence
  Description of Artificial Sequence: Synthetic oligonucleotide
cagagaactgtttctggcaa

SEQ ID NO: 10018 - DNA, 20 bp, Artificial Sequence
  Description of Artificial Sequence: Synthetic oligonucleotide
agagaactgtttctggcaaa

SEQ ID NO: 10019 - DNA, 20 bp, Artificial Sequence
  Description of Artificial Sequence: Synthetic oligonucleotide
gagaactgtttctggcaaaa

SEQ ID NO: 10020 - DNA, 20 bp, Artificial Sequence
  Description of Artificial Sequence: Synthetic oligonucleotide
agaactgtttctggcaaaac

SEQ ID NO: 10021 - DNA, 20 bp, Artificial Sequence
  Description of Artificial Sequence: Synthetic oligonucleotide
gaactgtttctggcaaaact

SEQ ID NO: 10022 - DNA, 20 bp, Artificial Sequence
  Description of Artificial Sequence: Synthetic oligonucleotide
aactgtttctggcaaaactt

SEQ ID NO: 10023 - DNA, 20 bp, Artificial Sequence
  Description of Artificial Sequence: Synthetic oligonucleotide
actgtttctggcaaaacttt

SEQ ID NO: 10024 - DNA, 20 bp, Artificial Sequence
  Description of Artificial Sequence: Synthetic oligonucleotide
ctgtttctggcaaaactttg

SEQ ID NO: 10025 - DNA, 20 bp, Artificial Sequence
  Description of Artificial Sequence: Synthetic oligonucleotide
tgtttctggcaaaactttgc

SEQ ID NO: 10026 - DNA, 20 bp, Artificial Sequence
  Description of Artificial Sequence: Synthetic oligonucleotide
gtttctggcaaaactttgct

SEQ ID NO: 10027 - DNA, 20 bp, Artificial Sequence
  Description of Artificial Sequence: Synthetic oligonucleotide
tttctggcaaaactttgctt

SEQ ID NO: 10028 - DNA, 20 bp, Artificial Sequence
  Description of Artificial Sequence: Synthetic oligonucleotide
ttctggcaaaactttgcttc

SEQ ID NO: 10029 - DNA, 20 bp, Artificial Sequence
  Description of Artificial Sequence: Synthetic oligonucleotide
tctggcaaaactttgcttcc

SEQ ID NO: 10030 - DNA, 20 bp, Artificial Sequence
  Description of Artificial Sequence: Synthetic oligonucleotide
ctggcaaaactttgcttcca

SEQ ID NO: 10031 - DNA, 20 bp, Artificial Sequence
  Description of Artificial Sequence: Synthetic oligonucleotide
tggcaaaactttgcttccag

SEQ ID NO: 10032 - DNA, 20 bp, Artificial Sequence
  Description of Artificial Sequence: Synthetic oligonucleotide
ggcaaaactttgcttccaga

SEQ ID NO: 10033 - DNA, 20 bp, Artificial Sequence
  Description of Artificial Sequence: Synthetic oligonucleotide
gcaaaactttgcttccagag

SEQ ID NO: 10034 - DNA, 20 bp, Artificial Sequence
  Description of Artificial Sequence: Synthetic oligonucleotide
caaaactttgcttccagagg

SEQ ID NO: 10035 - DNA, 20 bp, Artificial Sequence
  Description of Artificial Sequence: Synthetic oligonucleotide
aaaactttgcttccagagga

SEQ ID NO: 10036 - DNA, 20 bp, Artificial Sequence
  Description of Artificial Sequence: Synthetic oligonucleotide
aaactttgcttccagaggaa

SEQ ID NO: 10037 - DNA, 20 bp, Artificial Sequence
  Description of Artificial Sequence: Synthetic oligonucleotide
aactttgcttccagaggaac

SEQ ID NO: 10038 - DNA, 20 bp, Artificial Sequence
  Description of Artificial Sequence: Synthetic oligonucleotide
actttgcttccagaggaaca

SEQ ID NO: 10039 - DNA, 20 bp, Artificial Sequence
  Description of Artificial Sequence: Synthetic oligonucleotide
ctttgcttccagaggaacag

SEQ ID NO: 10040 - DNA, 20 bp, Artificial Sequence
  Description of Artificial Sequence: Synthetic oligonucleotide
tttgcttccagaggaacagc

SEQ ID NO: 10041 - DNA, 20 bp, Artificial Sequence
  Description of Artificial Sequence: Synthetic oligonucleotide
ttgcttccagaggaacagct

SEQ ID NO: 10042 - DNA, 20 bp, Artificial Sequence
  Description of Artificial Sequence: Synthetic oligonucleotide
tgcttccagaggaacagctg

SEQ ID NO: 10043 - DNA, 20 bp, Artificial Sequence
  Description of Artificial Sequence: Synthetic oligonucleotide
gcttccagaggaacagctgt

SEQ ID NO: 10044 - DNA, 20 bp, Artificial Sequence
  Description of Artificial Sequence: Synthetic oligonucleotide
cttccagaggaacagctgtt

SEQ ID NO: 10045 - DNA, 20 bp, Artificial Sequence
  Description of Artificial Sequence: Synthetic oligonucleotide
ttccagaggaacagctgtta

SEQ ID NO: 10046 - DNA, 20 bp, Artificial Sequence
  Description of Artificial Sequence: Synthetic oligonucleotide
tccagaggaacagctgttac

SEQ ID NO: 10047 - DNA, 20 bp, Artificial Sequence
  Description of Artificial Sequence: Synthetic oligonucleotide
ccagaggaacagctgttaca

SEQ ID NO: 10048 - DNA, 20 bp, Artificial Sequence
  Description of Artificial Sequence: Synthetic oligonucleotide
cagaggaacagctgttacag

SEQ ID NO: 10049 - DNA, 20 bp, Artificial Sequence
  Description of Artificial Sequence: Synthetic oligonucleotide
agaggaacagctgttacagt

SEQ ID NO: 10050 - DNA, 20 bp, Artificial Sequence
  Description of Artificial Sequence: Synthetic oligonucleotide
gaggaacagctgttacagtt

SEQ ID NO: 10051 - DNA, 20 bp, Artificial Sequence
  Description of Artificial Sequence: Synthetic oligonucleotide
aggaacagctgttacagttt

SEQ ID NO: 10052 - DNA, 20 bp, Artificial Sequence
  Description of Artificial Sequence: Synthetic oligonucleotide
ggaacagctgttacagtttg

SEQ ID NO: 10053 - DNA, 20 bp, Artificial Sequence
  Description of Artificial Sequence: Synthetic oligonucleotide
gaacagctgttacagtttgg

SEQ ID NO: 10054 - DNA, 20 bp, Artificial Sequence
  Description of Artificial Sequence: Synthetic oligonucleotide
aacagctgttacagtttggt

SEQ ID NO: 10055 - DNA, 20 bp, Artificial Sequence
  Description of Artificial Sequence: Synthetic oligonucleotide
acagctgttacagtttggtg

SEQ ID NO: 10056 - DNA, 20 bp, Artificial Sequence
  Description of Artificial Sequence: Synthetic oligonucleotide
cagctgttacagtttggtgc

SEQ ID NO: 10057 - DNA, 20 bp, Artificial Sequence
  Description of Artificial Sequence: Synthetic oligonucleotide
agctgttacagtttggtgct

SEQ ID NO: 10058 - DNA, 20 bp, Artificial Sequence
  Description of Artificial Sequence: Synthetic oligonucleotide
gctgttacagtttggtgctt

SEQ ID NO: 10059 - DNA, 20 bp, Artificial Sequence
  Description of Artificial Sequence: Synthetic oligonucleotide
ctgttacagtttggtgcttc

SEQ ID NO: 10060 - DNA, 20 bp, Artificial Sequence
  Description of Artificial Sequence: Synthetic oligonucleotide
tgttacagtttggtgcttcc

SEQ ID NO: 10061 - DNA, 20 bp, Artificial Sequence
  Description of Artificial Sequence: Synthetic oligonucleotide
gttacagtttggtgcttcct

SEQ ID NO: 10062 - DNA, 20 bp, Artificial Sequence
  Description of Artificial Sequence: Synthetic oligonucleotide
ttacagtttggtgcttcctt

SEQ ID NO: 10063 - DNA, 20 bp, Artificial Sequence
  Description of Artificial Sequence: Synthetic oligonucleotide
tacagtttggtgcttccttg

SEQ ID NO: 10064 - DNA, 20 bp, Artificial Sequence
  Description of Artificial Sequence: Synthetic oligonucleotide
acagtttggtgcttccttgg

SEQ ID NO: 10065 - DNA, 20 bp, Artificial Sequence
  Description of Artificial Sequence: Synthetic oligonucleotide
cagtttggtgcttccttgga

SEQ ID NO: 10066 - DNA, 20 bp, Artificial Sequence
  Description of Artificial Sequence: Synthetic oligonucleotide
agtttggtgcttccttggaa

SEQ ID NO: 10067 - DNA, 20 bp, Artificial Sequence
  Description of Artificial Sequence: Synthetic oligonucleotide
gtttggtgcttccttggaat

SEQ ID NO: 10068 - DNA, 20 bp, Artificial Sequence
  Description of Artificial Sequence: Synthetic oligonucleotide
tttggtgcttccttggaatt

SEQ ID NO: 10069 - DNA, 20 bp, Artificial Sequence
  Description of Artificial Sequence: Synthetic oligonucleotide
ttggtgcttccttggaattt

SEQ ID NO: 10070 - DNA, 20 bp, Artificial Sequence
  Description of Artificial Sequence: Synthetic oligonucleotide
tggtgcttccttggaatttc

SEQ ID NO: 10071 - DNA, 20 bp, Artificial Sequence
  Description of Artificial Sequence: Synthetic oligonucleotide
ggtgcttccttggaatttct

SEQ ID NO: 10072 - DNA, 20 bp, Artificial Sequence
  Description of Artificial Sequence: Synthetic oligonucleotide
gtgcttccttggaatttctt

SEQ ID NO: 10073 - DNA, 20 bp, Artificial Sequence
  Description of Artificial Sequence: Synthetic oligonucleotide
tgcttccttggaatttcttg

SEQ ID NO: 10074 - DNA, 20 bp, Artificial Sequence
  Description of Artificial Sequence: Synthetic oligonucleotide
gcttccttggaatttcttga

SEQ ID NO: 10075 - DNA, 20 bp, Artificial Sequence
  Description of Artificial Sequence: Synthetic oligonucleotide
cttccttggaatttcttgag

SEQ ID NO: 10076 - DNA, 20 bp, Artificial Sequence
  Description of Artificial Sequence: Synthetic oligonucleotide
ttccttggaatttcttgaga

SEQ ID NO: 10077 - DNA, 20 bp, Artificial Sequence
  Description of Artificial Sequence: Synthetic oligonucleotide
tccttggaatttcttgagat

SEQ ID NO: 10078 - DNA, 20 bp, Artificial Sequence
  Description of Artificial Sequence: Synthetic oligonucleotide
ccttggaatttcttgagata

SEQ ID NO: 10079 - DNA, 20 bp, Artificial Sequence
  Description of Artificial Sequence: Synthetic oligonucleotide
cttggaatttcttgagatat

SEQ ID NO: 10080 - DNA, 20 bp, Artificial Sequence
  Description of Artificial Sequence: Synthetic oligonucleotide
ttggaatttcttgagatata

SEQ ID NO: 10081 - DNA, 20 bp, Artificial Sequence
  Description of Artificial Sequence: Synthetic oligonucleotide
tggaatttcttgagatatag

SEQ ID NO: 10082 - DNA, 20 bp, Artificial Sequence
  Description of Artificial Sequence: Synthetic oligonucleotide
ggaatttcttgagatatagc

SEQ ID NO: 10083 - DNA, 20 bp, Artificial Sequence
  Description of Artificial Sequence: Synthetic oligonucleotide
gaatttcttgagatatagcc

SEQ ID NO: 10084 - DNA, 20 bp, Artificial Sequence
  Description of Artificial Sequence: Synthetic oligonucleotide
aatttcttgagatatagcct

SEQ ID NO: 10085 - DNA, 20 bp, Artificial Sequence
  Description of Artificial Sequence: Synthetic oligonucleotide
atttcttgagatatagcctg

SEQ ID NO: 10086 - DNA, 20 bp, Artificial Sequence
  Description of Artificial Sequence: Synthetic oligonucleotide
tttcttgagatatagcctgt

SEQ ID NO: 10087 - DNA, 20 bp, Artificial Sequence
  Description of Artificial Sequence: Synthetic oligonucleotide
ttcttgagatatagcctgtc

SEQ ID NO: 10088 - DNA, 20 bp, Artificial Sequence
  Description of Artificial Sequence: Synthetic oligonucleotide
tcttgagatatagcctgtca

SEQ ID NO: 10089 - DNA, 20 bp, Artificial Sequence
  Description of Artificial Sequence: Synthetic oligonucleotide
cttgagatatagcctgtcag

SEQ ID NO: 10090 - DNA, 20 bp, Artificial Sequence
  Description of Artificial Sequence: Synthetic oligonucleotide
ttgagatatagcctgtcagc

SEQ ID NO: 10091 - DNA, 20 bp, Artificial Sequence
  Description of Artificial Sequence: Synthetic oligonucleotide
tgagatatagcctgtcagct

SEQ ID NO: 10092 - DNA, 20 bp, Artificial Sequence
  Description of Artificial Sequence: Synthetic oligonucleotide
gagatatagcctgtcagctc

SEQ ID NO: 10093 - DNA, 20 bp, Artificial Sequence
  Description of Artificial Sequence: Synthetic oligonucleotide
agatatagcctgtcagctct

SEQ ID NO: 10094 - DNA, 20 bp, Artificial Sequence
  Description of Artificial Sequence: Synthetic oligonucleotide
gatatagcctgtcagctctt

SEQ ID NO: 10095 - DNA, 20 bp, Artificial Sequence
  Description of Artificial Sequence: Synthetic oligonucleotide
atatagcctgtcagctcttg

SEQ ID NO: 10096 - DNA, 20 bp, Artificial Sequence
  Description of Artificial Sequence: Synthetic oligonucleotide
tatagcctgtcagctcttgg

SEQ ID NO: 10097 - DNA, 20 bp, Artificial Sequence
  Description of Artificial Sequence: Synthetic oligonucleotide
atagcctgtcagctcttggt

SEQ ID NO: 10098 - DNA, 20 bp, Artificial Sequence
  Description of Artificial Sequence: Synthetic oligonucleotide
tagcctgtcagctcttggtg

SEQ ID NO: 10099 - DNA, 20 bp, Artificial Sequence
  Description of Artificial Sequence: Synthetic oligonucleotide
agcctgtcagctcttggtga

SEQ ID NO: 10100 - DNA, 20 bp, Artificial Sequence
  Description of Artificial Sequence: Synthetic oligonucleotide
gcctgtcagctcttggtgag

SEQ ID NO: 10101 - DNA, 20 bp, Artificial Sequence
  Description of Artificial Sequence: Synthetic oligonucleotide
cctgtcagctcttggtgagg

SEQ ID NO: 10102 - DNA, 20 bp, Artificial Sequence
  Description of Artificial Sequence: Synthetic oligonucleotide
ctgtcagctcttggtgagga

SEQ ID NO: 10103 - DNA, 20 bp, Artificial Sequence
  Description of Artificial Sequence: Synthetic oligonucleotide
tgtcagctcttggtgaggaa

SEQ ID NO: 10104 - DNA, 20 bp, Artificial Sequence
  Description of Artificial Sequence: Synthetic oligonucleotide
gtcagctcttggtgaggaag

SEQ ID NO: 10105 - DNA, 20 bp, Artificial Sequence
  Description of Artificial Sequence: Synthetic oligonucleotide
tcagctcttggtgaggaagt

SEQ ID NO: 10106 - DNA, 20 bp, Artificial Sequence
  Description of Artificial Sequence: Synthetic oligonucleotide
cagctcttggtgaggaagta

SEQ ID NO: 10107 - DNA, 20 bp, Artificial Sequence
  Description of Artificial Sequence: Synthetic oligonucleotide
agctcttggtgaggaagtag

SEQ ID NO: 10108 - DNA, 20 bp, Artificial Sequence
  Description of Artificial Sequence: Synthetic oligonucleotide
gctcttggtgaggaagtagc

SEQ ID NO: 10109 - DNA, 20 bp, Artificial Sequence
  Description of Artificial Sequence: Synthetic oligonucleotide
ctcttggtgaggaagtagca

SEQ ID NO: 10110 - DNA, 20 bp, Artificial Sequence
  Description of Artificial Sequence: Synthetic oligonucleotide
tcttggtgaggaagtagcag

SEQ ID NO: 10111 - DNA, 20 bp, Artificial Sequence
  Description of Artificial Sequence: Synthetic oligonucleotide
cttggtgaggaagtagcaga

SEQ ID NO: 10112 - DNA, 20 bp, Artificial Sequence
  Description of Artificial Sequence: Synthetic oligonucleotide
ttggtgaggaagtagcagag

SEQ ID NO: 10113 - DNA, 20 bp, Artificial Sequence
  Description of Artificial Sequence: Synthetic oligonucleotide
tggtgaggaagtagcagagc

SEQ ID NO: 10114 - DNA, 20 bp, Artificial Sequence
  Description of Artificial Sequence: Synthetic oligonucleotide
ggtgaggaagtagcagagct

SEQ ID NO: 10115 - DNA, 20 bp, Artificial Sequence
  Description of Artificial Sequence: Synthetic oligonucleotide
gtgaggaagtagcagagcta

SEQ ID NO: 10116 - DNA, 20 bp, Artificial Sequence
  Description of Artificial Sequence: Synthetic oligonucleotide
tgaggaagtagcagagctac

SEQ ID NO: 10117 - DNA, 20 bp, Artificial Sequence
  Description of Artificial Sequence: Synthetic oligonucleotide
gaggaagtagcagagctaca

SEQ ID NO: 10118 - DNA, 20 bp, Artificial Sequence
  Description of Artificial Sequence: Synthetic oligonucleotide
aggaagtagcagagctacac

SEQ ID NO: 10119 - DNA, 20 bp, Artificial Sequence
  Description of Artificial Sequence: Synthetic oligonucleotide
ggaagtagcagagctacacc

SEQ ID NO: 10120 - DNA, 20 bp, Artificial Sequence
  Description of Artificial Sequence: Synthetic oligonucleotide
gaagtagcagagctacacca

SEQ ID NO: 10121 - DNA, 20 bp, Artificial Sequence
  Description of Artificial Sequence: Synthetic oligonucleotide
aagtagcagagctacaccaa

SEQ ID NO: 10122 - DNA, 20 bp, Artificial Sequence
  Description of Artificial Sequence: Synthetic oligonucleotide
agtagcagagctacaccaat

SEQ ID NO: 10123 - DNA, 20 bp, Artificial Sequence
  Description of Artificial Sequence: Synthetic oligonucleotide
gtagcagagctacaccaatc

SEQ ID NO: 10124 - DNA, 20 bp, Artificial Sequence
  Description of Artificial Sequence: Synthetic oligonucleotide
tagcagagctacaccaatca

SEQ ID NO: 10125 - DNA, 20 bp, Artificial Sequence
  Description of Artificial Sequence: Synthetic oligonucleotide
agcagagctacaccaatcag

SEQ ID NO: 10126 - DNA, 20 bp, Artificial Sequence
  Description of Artificial Sequence: Synthetic oligonucleotide
gcagagctacaccaatcagg

SEQ ID NO: 10127 - DNA, 20 bp, Artificial Sequence
  Description of Artificial Sequence: Synthetic oligonucleotide
cagagctacaccaatcagga

SEQ ID NO: 10128 - DNA, 20 bp, Artificial Sequence
  Description of Artificial Sequence: Synthetic oligonucleotide
agagctacaccaatcaggaa

SEQ ID NO: 10129 - DNA, 20 bp, Artificial Sequence
  Description of Artificial Sequence: Synthetic oligonucleotide
gagctacaccaatcaggaag

SEQ ID NO: 10130 - DNA, 20 bp, Artificial Sequence
  Description of Artificial Sequence: Synthetic oligonucleotide
agctacaccaatcaggaaga

SEQ ID NO: 10131 - DNA, 20 bp, Artificial Sequence
  Description of Artificial Sequence: Synthetic oligonucleotide
gctacaccaatcaggaagac

SEQ ID NO: 10132 - DNA, 20 bp, Artificial Sequence
  Description of Artificial Sequence: Synthetic oligonucleotide
ctacaccaatcaggaagact

SEQ ID NO: 10133 - DNA, 20 bp, Artificial Sequence
  Description of Artificial Sequence: Synthetic oligonucleotide
tacaccaatcaggaagactt

SEQ ID NO: 10134 - DNA, 20 bp, Artificial Sequence
  Description of Artificial Sequence: Synthetic oligonucleotide
acaccaatcaggaagacttg

SEQ ID NO: 10135 - DNA, 20 bp, Artificial Sequence
  Description of Artificial Sequence: Synthetic oligonucleotide
caccaatcaggaagacttga

SEQ ID NO: 10136 - DNA, 20 bp, Artificial Sequence
  Description of Artificial Sequence: Synthetic oligonucleotide
accaatcaggaagacttgaa

SEQ ID NO: 10137 - DNA, 20 bp, Artificial Sequence
  Description of Artificial Sequence: Synthetic oligonucleotide
ccaatcaggaagacttgaac

SEQ ID NO: 10138 - DNA, 20 bp, Artificial Sequence
  Description of Artificial Sequence: Synthetic oligonucleotide
caatcaggaagacttgaacc

SEQ ID NO: 10139 - DNA, 20 bp, Artificial Sequence
  Description of Artificial Sequence: Synthetic oligonucleotide
aatcaggaagacttgaaccc

SEQ ID NO: 10140 - DNA, 20 bp, Artificial Sequence
  Description of Artificial Sequence: Synthetic oligonucleotide
atcaggaagacttgaaccct

SEQ ID NO: 10141 - DNA, 20 bp, Artificial Sequence
  Description of Artificial Sequence: Synthetic oligonucleotide
tcaggaagacttgaaccctg

SEQ ID NO: 10142 - DNA, 20 bp, Artificial Sequence
  Description of Artificial Sequence: Synthetic oligonucleotide
caggaagacttgaaccctgc

SEQ ID NO: 10143 - DNA, 20 bp, Artificial Sequence
  Description of Artificial Sequence: Synthetic oligonucleotide
aggaagacttgaaccctgct

SEQ ID NO: 10144 - DNA, 20 bp, Artificial Sequence
  Description of Artificial Sequence: Synthetic oligonucleotide
ggaagacttgaaccctgctt

SEQ ID NO: 10145 - DNA, 20 bp, Artificial Sequence
  Description of Artificial Sequence: Synthetic oligonucleotide
gaagacttgaaccctgcttc

SEQ ID NO: 10146 - DNA, 20 bp, Artificial Sequence
  Description of Artificial Sequence: Synthetic oligonucleotide
aagacttgaaccctgcttct

SEQ ID NO: 10147 - DNA, 20 bp, Artificial Sequence
  Description of Artificial Sequence: Synthetic oligonucleotide
agacttgaaccctgcttcta

SEQ ID NO: 10148 - DNA, 20 bp, Artificial Sequence
  Description of Artificial Sequence: Synthetic oligonucleotide
gacttgaaccctgcttctaa

SEQ ID NO: 10149 - DNA, 20 bp, Artificial Sequence
  Description of Artificial Sequence: Synthetic oligonucleotide
acttgaaccctgcttctaag

SEQ ID NO: 10150 - DNA, 20 bp, Artificial Sequence
  Description of Artificial Sequence: Synthetic oligonucleotide
cttgaaccctgcttctaaga

SEQ ID NO: 10151 - DNA, 20 bp, Artificial Sequence
  Description of Artificial Sequence: Synthetic oligonucleotide
ttgaaccctgcttctaagac

SEQ ID NO: 10152 - DNA, 20 bp, Artificial Sequence
  Description of Artificial Sequence: Synthetic oligonucleotide
tgaaccctgcttctaagact

SEQ ID NO: 10153 - DNA, 20 bp, Artificial Sequence
  Description of Artificial Sequence: Synthetic oligonucleotide
gaaccctgcttctaagactt

SEQ ID NO: 10154 - DNA, 20 bp, Artificial Sequence
  Description of Artificial Sequence: Synthetic oligonucleotide
aaccctgcttctaagacttg

SEQ ID NO: 10155 - DNA, 20 bp, Artificial Sequence
  Description of Artificial Sequence: Synthetic oligonucleotide
accctgcttctaagacttgc

SEQ ID NO: 10156 - DNA, 20 bp, Artificial Sequence
  Description of Artificial Sequence: Synthetic oligonucleotide
ccctgcttctaagacttgct

SEQ ID NO: 10157 - DNA, 20 bp, Artificial Sequence
  Description of Artificial Sequence: Synthetic oligonucleotide
cctgcttctaagacttgctg

SEQ ID NO: 10158 - DNA, 20 bp, Artificial Sequence
  Description of Artificial Sequence: Synthetic oligonucleotide
ctgcttctaagacttgctgg

SEQ ID NO: 10159 - DNA, 20 bp, Artificial Sequence
  Description of Artificial Sequence: Synthetic oligonucleotide
tgcttctaagacttgctggg

SEQ ID NO: 10160 - DNA, 20 bp, Artificial Sequence
  Description of Artificial Sequence: Synthetic oligonucleotide
gcttctaagacttgctgggt

SEQ ID NO: 10161 - DNA, 20 bp, Artificial Sequence
  Description of Artificial Sequence: Synthetic oligonucleotide
cttctaagacttgctgggtg

SEQ ID NO: 10162 - DNA, 20 bp, Artificial Sequence
  Description of Artificial Sequence: Synthetic oligonucleotide
ttctaagacttgctgggtga

SEQ ID NO: 10163 - DNA, 20 bp, Artificial Sequence
  Description of Artificial Sequence: Synthetic oligonucleotide
tctaagacttgctgggtgac

SEQ ID NO: 10164 - DNA, 20 bp, Artificial Sequence
  Description of Artificial Sequence: Synthetic oligonucleotide
ctaagacttgctgggtgact

SEQ ID NO: 10165 - DNA, 20 bp, Artificial Sequence
  Description of Artificial Sequence: Synthetic oligonucleotide
taagacttgctgggtgactt

SEQ ID NO: 10166 - DNA, 20 bp, Artificial Sequence
  Description of Artificial Sequence: Synthetic oligonucleotide
aagacttgctgggtgacttt

SEQ ID NO: 10167 - DNA, 20 bp, Artificial Sequence
  Description of Artificial Sequence: Synthetic oligonucleotide
agacttgctgggtgactttg

SEQ ID NO: 10168 - DNA, 20 bp, Artificial Sequence
  Description of Artificial Sequence: Synthetic oligonucleotide
gacttgctgggtgactttgg

SEQ ID NO: 10169 - DNA, 20 bp, Artificial Sequence
  Description of Artificial Sequence: Synthetic oligonucleotide
acttgctgggtgactttggg

SEQ ID NO: 10170 - DNA, 20 bp, Artificial Sequence
  Description of Artificial Sequence: Synthetic oligonucleotide
cttgctgggtgactttgggc

SEQ ID NO: 10171 - DNA, 20 bp, Artificial Sequence
  Description of Artificial Sequence: Synthetic oligonucleotide
ttgctgggtgactttgggca

SEQ ID NO: 10172 - DNA, 20 bp, Artificial Sequence
  Description of Artificial Sequence: Synthetic oligonucleotide
tgctgggtgactttgggcaa

SEQ ID NO: 10173 - DNA, 20 bp, Artificial Sequence
  Description of Artificial Sequence: Synthetic oligonucleotide
gctgggtgactttgggcaaa

SEQ ID NO: 10174 - DNA, 20 bp, Artificial Sequence
  Description of Artificial Sequence: Synthetic oligonucleotide
ctgggtgactttgggcaaac

SEQ ID NO: 10175 - DNA, 20 bp, Artificial Sequence
  Description of Artificial Sequence: Synthetic oligonucleotide
tgggtgactttgggcaaacc

SEQ ID NO: 10176 - DNA, 20 bp, Artificial Sequence
  Description of Artificial Sequence: Synthetic oligonucleotide
gggtgactttgggcaaacca

SEQ ID NO: 10177 - DNA, 20 bp, Artificial Sequence
  Description of Artificial Sequence: Synthetic oligonucleotide
ggtgactttgggcaaaccat

SEQ ID NO: 10178 - DNA, 20 bp, Artificial Sequence
  Description of Artificial Sequence: Synthetic oligonucleotide
gtgactttgggcaaaccatg

SEQ ID NO: 10179 - DNA, 20 bp, Artificial Sequence
  Description of Artificial Sequence: Synthetic oligonucleotide
tgactttgggcaaaccatgt

SEQ ID NO: 10180 - DNA, 20 bp, Artificial Sequence
  Description of Artificial Sequence: Synthetic oligonucleotide
gactttgggcaaaccatgta

SEQ ID NO: 10181 - DNA, 20 bp, Artificial Sequence
  Description of Artificial Sequence: Synthetic oligonucleotide
actttgggcaaaccatgtag

SEQ ID NO: 10182 - DNA, 20 bp, Artificial Sequence
  Description of Artificial Sequence: Synthetic oligonucleotide
ctttgggcaaaccatgtagt

SEQ ID NO: 10183 - DNA, 20 bp, Artificial Sequence
  Description of Artificial Sequence: Synthetic oligonucleotide
tttgggcaaaccatgtagta

SEQ ID NO: 10184 - DNA, 20 bp, Artificial Sequence
  Description of Artificial Sequence: Synthetic oligonucleotide
ttgggcaaaccatgtagtat

SEQ ID NO: 10185 - DNA, 20 bp, Artificial Sequence
  Description of Artificial Sequence: Synthetic oligonucleotide
tgggcaaaccatgtagtatc

SEQ ID NO: 10186 - DNA, 20 bp, Artificial Sequence
  Description of Artificial Sequence: Synthetic oligonucleotide
gggcaaaccatgtagtatct

SEQ ID NO: 10187 - DNA, 20 bp, Artificial Sequence
  Description of Artificial Sequence: Synthetic oligonucleotide
ggcaaaccatgtagtatctc

SEQ ID NO: 10188 - DNA, 20 bp, Artificial Sequence
  Description of Artificial Sequence: Synthetic oligonucleotide
gcaaaccatgtagtatctca

SEQ ID NO: 10189 - DNA, 20 bp, Artificial Sequence
  Description of Artificial Sequence: Synthetic oligonucleotide
caaaccatgtagtatctcag

SEQ ID NO: 10190 - DNA, 20 bp, Artificial Sequence
  Description of Artificial Sequence: Synthetic oligonucleotide
aaaccatgtagtatctcagc

SEQ ID NO: 10191 - DNA, 20 bp, Artificial Sequence
  Description of Artificial Sequence: Synthetic oligonucleotide
aaccatgtagtatctcagca

SEQ ID NO: 10192 - DNA, 20 bp, Artificial Sequence
  Description of Artificial Sequence: Synthetic oligonucleotide
accatgtagtatctcagcac

SEQ ID NO: 10193 - DNA, 20 bp, Artificial Sequence
  Description of Artificial Sequence: Synthetic oligonucleotide
ccatgtagtatctcagcact

SEQ ID NO: 10194 - DNA, 20 bp, Artificial Sequence
  Description of Artificial Sequence: Synthetic oligonucleotide
catgtagtatctcagcactc

SEQ ID NO: 10195 - DNA, 20 bp, Artificial Sequence
  Description of Artificial Sequence: Synthetic oligonucleotide
atgtagtatctcagcactcc

SEQ ID NO: 10196 - DNA, 20 bp, Artificial Sequence
  Description of Artificial Sequence: Synthetic oligonucleotide
tgtagtatctcagcactcca

SEQ ID NO: 10197 - DNA, 20 bp, Artificial Sequence
  Description of Artificial Sequence: Synthetic oligonucleotide
gtagtatctcagcactccaa

SEQ ID NO: 10198 - DNA, 20 bp, Artificial Sequence
  Description of Artificial Sequence: Synthetic oligonucleotide
tagtatctcagcactccaag

SEQ ID NO: 10199 - DNA, 20 bp, Artificial Sequence
  Description of Artificial Sequence: Synthetic oligonucleotide
agtatctcagcactccaaga

SEQ ID NO: 10200 - DNA, 20 bp, Artificial Sequence
  Description of Artificial Sequence: Synthetic oligonucleotide
gtatctcagcactccaagat

SEQ ID NO: 10201 - DNA, 20 bp, Artificial Sequence
  Description of Artificial Sequence: Synthetic oligonucleotide
tatctcagcactccaagatg

SEQ ID NO: 10202 - DNA, 20 bp, Artificial Sequence
  Description of Artificial Sequence: Synthetic oligonucleotide
atctcagcactccaagatgg

SEQ ID NO: 10203 - DNA, 20 bp, Artificial Sequence
  Description of Artificial Sequence: Synthetic oligonucleotide
tctcagcactccaagatggt

SEQ ID NO: 10204 - DNA, 20 bp, Artificial Sequence
  Description of Artificial Sequence: Synthetic oligonucleotide
ctcagcactccaagatggta

SEQ ID NO: 10205 - DNA, 20 bp, Artificial Sequence
  Description of Artificial Sequence: Synthetic oligonucleotide
tcagcactccaagatggtag

SEQ ID NO: 10206 - DNA, 20 bp, Artificial Sequence
  Description of Artificial Sequence: Synthetic oligonucleotide
cagcactccaagatggtagg

SEQ ID NO: 10207 - DNA, 20 bp, Artificial Sequence
  Description of Artificial Sequence: Synthetic oligonucleotide
agcactccaagatggtaggc

SEQ ID NO: 10208 - DNA, 20 bp, Artificial Sequence
  Description of Artificial Sequence: Synthetic oligonucleotide
gcactccaagatggtaggct

SEQ ID NO: 10209 - DNA, 20 bp, Artificial Sequence
  Description of Artificial Sequence: Synthetic oligonucleotide
cactccaagatggtaggctg

SEQ ID NO: 10210 - DNA, 20 bp, Artificial Sequence
  Description of Artificial Sequence: Synthetic oligonucleotide
actccaagatggtaggctga

SEQ ID NO: 10211 - DNA, 20 bp, Artificial Sequence
  Description of Artificial Sequence: Synthetic oligonucleotide
ctccaagatggtaggctgaa

SEQ ID NO: 10212 - DNA, 20 bp, Artificial Sequence
  Description of Artificial Sequence: Synthetic oligonucleotide
tccaagatggtaggctgaaa

SEQ ID NO: 10213 - DNA, 20 bp, Artificial Sequence
  Description of Artificial Sequence: Synthetic oligonucleotide
ccaagatggtaggctgaaac

SEQ ID NO: 10214 - DNA, 20 bp, Artificial Sequence
  Description of Artificial Sequence: Synthetic oligonucleotide
caagatggtaggctgaaaca

SEQ ID NO: 10215 - DNA, 20 bp, Artificial Sequence
  Description of Artificial Sequence: Synthetic oligonucleotide
aagatggtaggctgaaacac

SEQ ID NO: 10216 - DNA, 20 bp, Artificial Sequence
  Description of Artificial Sequence: Synthetic oligonucleotide
agatggtaggctgaaacact

SEQ ID NO: 10217 - DNA, 20 bp, Artificial Sequence
  Description of Artificial Sequence: Synthetic oligonucleotide
gatggtaggctgaaacactg

SEQ ID NO: 10218 - DNA, 20 bp, Artificial Sequence
  Description of Artificial Sequence: Synthetic oligonucleotide
atggtaggctgaaacactgt

SEQ ID NO: 10219 - DNA, 20 bp, Artificial Sequence
  Description of Artificial Sequence: Synthetic oligonucleotide
tggtaggctgaaacactgtg

SEQ ID NO: 10220 - DNA, 20 bp, Artificial Sequence
  Description of Artificial Sequence: Synthetic oligonucleotide
ggtaggctgaaacactgtgt

SEQ ID NO: 10221 - DNA, 20 bp, Artificial Sequence
  Description of Artificial Sequence: Synthetic oligonucleotide
gtaggctgaaacactgtgtg

SEQ ID NO: 10222 - DNA, 20 bp, Artificial Sequence
  Description of Artificial Sequence: Synthetic oligonucleotide
taggctgaaacactgtgtgg

SEQ ID NO: 10223 - DNA, 20 bp, Artificial Sequence
  Description of Artificial Sequence: Synthetic oligonucleotide
aggctgaaacactgtgtgga

SEQ ID NO: 10224 - DNA, 20 bp, Artificial Sequence
  Description of Artificial Sequence: Synthetic oligonucleotide
ggctgaaacactgtgtggat

SEQ ID NO: 10225 - DNA, 20 bp, Artificial Sequence
  Description of Artificial Sequence: Synthetic oligonucleotide
gctgaaacactgtgtggata

SEQ ID NO: 10226 - DNA, 20 bp, Artificial Sequence
  Description of Artificial Sequence: Synthetic oligonucleotide
ctgaaacactgtgtggataa

SEQ ID NO: 10227 - DNA, 20 bp, Artificial Sequence
  Description of Artificial Sequence: Synthetic oligonucleotide
tgaaacactgtgtggataaa

SEQ ID NO: 10228 - DNA, 20 bp, Artificial Sequence
  Description of Artificial Sequence: Synthetic oligonucleotide
gaaacactgtgtggataaaa

SEQ ID NO: 10229 - DNA, 20 bp, Artificial Sequence
  Description of Artificial Sequence: Synthetic oligonucleotide
aaacactgtgtggataaaag

SEQ ID NO: 10230 - DNA, 20 bp, Artificial Sequence
  Description of Artificial Sequence: Synthetic oligonucleotide
aacactgtgtggataaaaga

SEQ ID NO: 10231 - DNA, 20 bp, Artificial Sequence
  Description of Artificial Sequence: Synthetic oligonucleotide
acactgtgtggataaaagag

SEQ ID NO: 10232 - DNA, 20 bp, Artificial Sequence
  Description of Artificial Sequence: Synthetic oligonucleotide
cactgtgtggataaaagaga

SEQ ID NO: 10233 - DNA, 20 bp, Artificial Sequence
  Description of Artificial Sequence: Synthetic oligonucleotide
actgtgtggataaaagagac

SEQ ID NO: 10234 - DNA, 20 bp, Artificial Sequence
  Description of Artificial Sequence: Synthetic oligonucleotide
ctgtgtggataaaagagacc

SEQ ID NO: 10235 - DNA, 20 bp, Artificial Sequence
  Description of Artificial Sequence: Synthetic oligonucleotide
tgtgtggataaaagagaccc

SEQ ID NO: 10236 - DNA, 20 bp, Artificial Sequence
  Description of Artificial Sequence: Synthetic oligonucleotide
gtgtggataaaagagacccg

SEQ ID NO: 10237 - DNA, 20 bp, Artificial Sequence
  Description of Artificial Sequence: Synthetic oligonucleotide
tgtggataaaagagacccgt

SEQ ID NO: 10238 - DNA, 20 bp, Artificial Sequence
  Description of Artificial Sequence: Synthetic oligonucleotide
gtggataaaagagacccgtg

SEQ ID NO: 10239 - DNA, 20 bp, Artificial Sequence
  Description of Artificial Sequence: Synthetic oligonucleotide
tggataaaagagacccgtga

SEQ ID NO: 10240 - DNA, 20 bp, Artificial Sequence
  Description of Artificial Sequence: Synthetic oligonucleotide
ggataaaagagacccgtgaa

SEQ ID NO: 10241 - DNA, 20 bp, Artificial Sequence
  Description of Artificial Sequence: Synthetic oligonucleotide
gataaaagagacccgtgaag

SEQ ID NO: 10242 - DNA, 20 bp, Artificial Sequence
  Description of Artificial Sequence: Synthetic oligonucleotide
ataaaagagacccgtgaagg

SEQ ID NO: 10243 - DNA, 20 bp, Artificial Sequence
  Description of Artificial Sequence: Synthetic oligonucleotide
taaaagagacccgtgaaggt

SEQ ID NO: 10244 - DNA, 20 bp, Artificial Sequence
  Description of Artificial Sequence: Synthetic oligonucleotide
aaaagagacccgtgaaggtg

SEQ ID NO: 10245 - DNA, 20 bp, Artificial Sequence
  Description of Artificial Sequence: Synthetic oligonucleotide
aaagagacccgtgaaggtgt

SEQ ID NO: 10246 - DNA, 20 bp, Artificial Sequence
  Description of Artificial Sequence: Synthetic oligonucleotide
aagagacccgtgaaggtgtt

SEQ ID NO: 10247 - DNA, 20 bp, Artificial Sequence
  Description of Artificial Sequence: Synthetic oligonucleotide
agagacccgtgaaggtgtta

SEQ ID NO: 10248 - DNA, 20 bp, Artificial Sequence
  Description of Artificial Sequence: Synthetic oligonucleotide
gagacccgtgaaggtgttag

SEQ ID NO: 10249 - DNA, 20 bp, Artificial Sequence
  Description of Artificial Sequence: Synthetic oligonucleotide
agacccgtgaaggtgttagg

SEQ ID NO: 10250 - DNA, 20 bp, Artificial Sequence
  Description of Artificial Sequence: Synthetic oligonucleotide
gacccgtgaaggtgttaggt

SEQ ID NO: 10251 - DNA, 20 bp, Artificial Sequence
  Description of Artificial Sequence: Synthetic oligonucleotide
acccgtgaaggtgttaggta

SEQ ID NO: 10252 - DNA, 20 bp, Artificial Sequence
  Description of Artificial Sequence: Synthetic oligonucleotide
cccgtgaaggtgttaggtaa

SEQ ID NO: 10253 - DNA, 20 bp, Artificial Sequence
  Description of Artificial Sequence: Synthetic oligonucleotide
ccgtgaaggtgttaggtaaa

SEQ ID NO: 10254 - DNA, 20 bp, Artificial Sequence
  Description of Artificial Sequence: Synthetic oligonucleotide
cgtgaaggtgttaggtaaac

SEQ ID NO: 10255 - DNA, 20 bp, Artificial Sequence
  Description of Artificial Sequence: Synthetic oligonucleotide
gtgaaggtgttaggtaaact

SEQ ID NO: 10256 - DNA, 20 bp, Artificial Sequence
  Description of Artificial Sequence: Synthetic oligonucleotide
tgaaggtgttaggtaaactt

SEQ ID NO: 10257 - DNA, 20 bp, Artificial Sequence
  Description of Artificial Sequence: Synthetic oligonucleotide
gaaggtgttaggtaaactta

SEQ ID NO: 10258 - DNA, 20 bp, Artificial Sequence
  Description of Artificial Sequence: Synthetic oligonucleotide
aaggtgttaggtaaacttac

SEQ ID NO: 10259 - DNA, 20 bp, Artificial Sequence
  Description of Artificial Sequence: Synthetic oligonucleotide
aggtgttaggtaaacttaca

SEQ ID NO: 10260 - DNA, 20 bp, Artificial Sequence
  Description of Artificial Sequence: Synthetic oligonucleotide
ggtgttaggtaaacttacat

SEQ ID NO: 10261 - DNA, 20 bp, Artificial Sequence
  Description of Artificial Sequence: Synthetic oligonucleotide
gtgttaggtaaacttacata

SEQ ID NO: 10262 - DNA, 20 bp, Artificial Sequence
  Description of Artificial Sequence: Synthetic oligonucleotide
tgttaggtaaacttacatag

SEQ ID NO: 10263 - DNA, 20 bp, Artificial Sequence
  Description of Artificial Sequence: Synthetic oligonucleotide
gttaggtaaacttacatagc

SEQ ID NO: 10264 - DNA, 20 bp, Artificial Sequence
  Description of Artificial Sequence: Synthetic oligonucleotide
ttaggtaaacttacatagca

SEQ ID NO: 10265 - DNA, 20 bp, Artificial Sequence
  Description of Artificial Sequence: Synthetic oligonucleotide
taggtaaacttacatagcat

SEQ ID NO: 10266 - DNA, 20 bp, Artificial Sequence
  Description of Artificial Sequence: Synthetic oligonucleotide
aggtaaacttacatagcatt

SEQ ID NO: 10267 - DNA, 20 bp, Artificial Sequence
  Description of Artificial Sequence: Synthetic oligonucleotide
ggtaaacttacatagcatta

SEQ ID NO: 10268 - DNA, 20 bp, Artificial Sequence
  Description of Artificial Sequence: Synthetic oligonucleotide
gtaaacttacatagcattag

SEQ ID NO: 10269 - DNA, 20 bp, Artificial Sequence
  Description of Artificial Sequence: Synthetic oligonucleotide
taaacttacatagcattaga

SEQ ID NO: 10270 - DNA, 20 bp, Artificial Sequence
  Description of Artificial Sequence: Synthetic oligonucleotide
aaacttacatagcattagaa

SEQ ID NO: 10271 - DNA, 20 bp, Artificial Sequence
  Description of Artificial Sequence: Synthetic oligonucleotide
aacttacatagcattagaag

SEQ ID NO: 10272 - DNA, 20 bp, Artificial Sequence
  Description of Artificial Sequence: Synthetic oligonucleotide
acttacatagcattagaagt

SEQ ID NO: 10273 - DNA, 20 bp, Artificial Sequence
  Description of Artificial Sequence: Synthetic oligonucleotide
cttacatagcattagaagtc

SEQ ID NO: 10274 - DNA, 20 bp, Artificial Sequence
  Description of Artificial Sequence: Synthetic oligonucleotide
ttacatagcattagaagtca

SEQ ID NO: 10275 - DNA, 20 bp, Artificial Sequence
  Description of Artificial Sequence: Synthetic oligonucleotide
tacatagcattagaagtcaa

SEQ ID NO: 10276 - DNA, 20 bp, Artificial Sequence
  Description of Artificial Sequence: Synthetic oligonucleotide
acatagcattagaagtcaaa

SEQ ID NO: 10277 - DNA, 20 bp, Artificial Sequence
  Description of Artificial Sequence: Synthetic oligonucleotide
catagcattagaagtcaaag

SEQ ID NO: 10278 - DNA, 20 bp, Artificial Sequence
  Description of Artificial Sequence: Synthetic oligonucleotide
atagcattagaagtcaaagg

SEQ ID NO: 10279 - DNA, 20 bp, Artificial Sequence
  Description of Artificial Sequence: Synthetic oligonucleotide
tagcattagaagtcaaagga

SEQ ID NO: 10280 - DNA, 20 bp, Artificial Sequence
  Description of Artificial Sequence: Synthetic oligonucleotide
agcattagaagtcaaaggaa

SEQ ID NO: 10281 - DNA, 20 bp, Artificial Sequence
  Description of Artificial Sequence: Synthetic oligonucleotide
gcattagaagtcaaaggaaa

SEQ ID NO: 10282 - DNA, 20 bp, Artificial Sequence
  Description of Artificial Sequence: Synthetic oligonucleotide
cattagaagtcaaaggaaat

SEQ ID NO: 10283 - DNA, 20 bp, Artificial Sequence
  Description of Artificial Sequence: Synthetic oligonucleotide
attagaagtcaaaggaaata

SEQ ID NO: 10284 - DNA, 20 bp, Artificial Sequence
  Description of Artificial Sequence: Synthetic oligonucleotide
ttagaagtcaaaggaaatac

SEQ ID NO: 10285 - DNA, 20 bp, Artificial Sequence
  Description of Artificial Sequence: Synthetic oligonucleotide
tagaagtcaaaggaaatact

SEQ ID NO: 10286 - DNA, 20 bp, Artificial Sequence
  Description of Artificial Sequence: Synthetic oligonucleotide
agaagtcaaaggaaatactg

SEQ ID NO: 10287 - DNA, 20 bp, Artificial Sequence
  Description of Artificial Sequence: Synthetic oligonucleotide
gaagtcaaaggaaatactgc

SEQ ID NO: 10288 - DNA, 20 bp, Artificial Sequence
  Description of Artificial Sequence: Synthetic oligonucleotide
aagtcaaaggaaatactgca

SEQ ID NO: 10289 - DNA, 20 bp, Artificial Sequence
  Description of Artificial Sequence: Synthetic oligonucleotide
agtcaaaggaaatactgcat

SEQ ID NO: 10290 - DNA, 20 bp, Artificial Sequence
  Description of Artificial Sequence: Synthetic oligonucleotide
gtcaaaggaaatactgcata

SEQ ID NO: 10291 - DNA, 20 bp, Artificial Sequence
  Description of Artificial Sequence: Synthetic oligonucleotide
tcaaaggaaatactgcataa

SEQ ID NO: 10292 - DNA, 20 bp, Artificial Sequence
  Description of Artificial Sequence: Synthetic oligonucleotide
caaaggaaatactgcataag

SEQ ID NO: 10293 - DNA, 20 bp, Artificial Sequence
  Description of Artificial Sequence: Synthetic oligonucleotide
aaaggaaatactgcataagc

SEQ ID NO: 10294 - DNA, 20 bp, Artificial Sequence
  Description of Artificial Sequence: Synthetic oligonucleotide
aaggaaatactgcataagcc

SEQ ID NO: 10295 - DNA, 20 bp, Artificial Sequence
  Description of Artificial Sequence: Synthetic oligonucleotide
aggaaatactgcataagcct

SEQ ID NO: 10296 - DNA, 20 bp, Artificial Sequence
  Description of Artificial Sequence: Synthetic oligonucleotide
ggaaatactgcataagcctt

SEQ ID NO: 10297 - DNA, 20 bp, Artificial Sequence
  Description of Artificial Sequence: Synthetic oligonucleotide
gaaatactgcataagccttt

SEQ ID NO: 10298 - DNA, 20 bp, Artificial Sequence
  Description of Artificial Sequence: Synthetic oligonucleotide
aaatactgcataagccttta

SEQ ID NO: 10299 - DNA, 20 bp, Artificial Sequence
  Description of Artificial Sequence: Synthetic oligonucleotide
aatactgcataagcctttac

SEQ ID NO: 10300 - DNA, 20 bp, Artificial Sequence
  Description of Artificial Sequence: Synthetic oligonucleotide
atactgcataagcctttact

SEQ ID NO: 10301 - DNA, 20 bp, Artificial Sequence
  Description of Artificial Sequence: Synthetic oligonucleotide
tactgcataagcctttacta

SEQ ID NO: 10302 - DNA, 20 bp, Artificial Sequence
  Description of Artificial Sequence: Synthetic oligonucleotide
actgcataagcctttactaa

SEQ ID NO: 10303 - DNA, 20 bp, Artificial Sequence
  Description of Artificial Sequence: Synthetic oligonucleotide
ctgcataagcctttactaaa

SEQ ID NO: 10304 - DNA, 20 bp, Artificial Sequence
  Description of Artificial Sequence: Synthetic oligonucleotide
tgcataagcctttactaaag

SEQ ID NO: 10305 - DNA, 20 bp, Artificial Sequence
  Description of Artificial Sequence: Synthetic oligonucleotide
gcataagcctttactaaagg

SEQ ID NO: 10306 - DNA, 20 bp, Artificial Sequence
  Description of Artificial Sequence: Synthetic oligonucleotide
cataagcctttactaaaggg

SEQ ID NO: 10307 - DNA, 20 bp, Artificial Sequence
  Description of Artificial Sequence: Synthetic oligonucleotide
ataagcctttactaaaggga

SEQ ID NO: 10308 - DNA, 20 bp, Artificial Sequence
  Description of Artificial Sequence: Synthetic oligonucleotide
taagcctttactaaagggaa

SEQ ID NO: 10309 - DNA, 20 bp, Artificial Sequence
  Description of Artificial Sequence: Synthetic oligonucleotide
aagcctttactaaagggaaa

SEQ ID NO: 10310 - DNA, 20 bp, Artificial Sequence
  Description of Artificial Sequence: Synthetic oligonucleotide
agcctttactaaagggaaag

SEQ ID NO: 10311 - DNA, 20 bp, Artificial Sequence
  Description of Artificial Sequence: Synthetic oligonucleotide
gcctttactaaagggaaagt

SEQ ID NO: 10312 - DNA, 20 bp, Artificial Sequence
  Description of Artificial Sequence: Synthetic oligonucleotide
cctttactaaagggaaagtg

SEQ ID NO: 10313 - DNA, 20 bp, Artificial Sequence
  Description of Artificial Sequence: Synthetic oligonucleotide
ctttactaaagggaaagtgt

SEQ ID NO: 10314 - DNA, 20 bp, Artificial Sequence
  Description of Artificial Sequence: Synthetic oligonucleotide
tttactaaagggaaagtgta

SEQ ID NO: 10315 - DNA, 20 bp, Artificial Sequence
  Description of Artificial Sequence: Synthetic oligonucleotide
ttactaaagggaaagtgtac

SEQ ID NO: 10316 - DNA, 20 bp, Artificial Sequence
  Description of Artificial Sequence: Synthetic oligonucleotide
tactaaagggaaagtgtacc

SEQ ID NO: 10317 - DNA, 20 bp, Artificial Sequence
  Description of Artificial Sequence: Synthetic oligonucleotide
actaaagggaaagtgtaccc

SEQ ID NO: 10318 - DNA, 20 bp, Artificial Sequence
  Description of Artificial Sequence: Synthetic oligonucleotide
ctaaagggaaagtgtaccca

SEQ ID NO: 10319 - DNA, 20 bp, Artificial Sequence
  Description of Artificial Sequence: Synthetic oligonucleotide
taaagggaaagtgtacccac

SEQ ID NO: 10320 - DNA, 20 bp, Artificial Sequence
  Description of Artificial Sequence: Synthetic oligonucleotide
aaagggaaagtgtacccaca

SEQ ID NO: 10321 - DNA, 20 bp, Artificial Sequence
  Description of Artificial Sequence: Synthetic oligonucleotide
aagggaaagtgtacccacaa

SEQ ID NO: 10322 - DNA, 20 bp, Artificial Sequence
  Description of Artificial Sequence: Synthetic oligonucleotide
agggaaagtgtacccacaaa

SEQ ID NO: 10323 - DNA, 20 bp, Artificial Sequence
  Description of Artificial Sequence: Synthetic oligonucleotide
gggaaagtgtacccacaaaa

SEQ ID NO: 10324 - DNA, 20 bp, Artificial Sequence
  Description of Artificial Sequence: Synthetic oligonucleotide
ggaaagtgtacccacaaaag

SEQ ID NO: 10325 - DNA, 20 bp, Artificial Sequence
  Description of Artificial Sequence: Synthetic oligonucleotide
gaaagtgtacccacaaaaga

SEQ ID NO: 10326 - DNA, 20 bp, Artificial Sequence
  Description of Artificial Sequence: Synthetic oligonucleotide
aaagtgtacccacaaaagag

SEQ ID NO: 10327 - DNA, 20 bp, Artificial Sequence
  Description of Artificial Sequence: Synthetic oligonucleotide
aagtgtacccacaaaagagg

SEQ ID NO: 10328 - DNA, 20 bp, Artificial Sequence
  Description of Artificial Sequence: Synthetic oligonucleotide
agtgtacccacaaaagaggc

SEQ ID NO: 10329 - DNA, 20 bp, Artificial Sequence
  Description of Artificial Sequence: Synthetic oligonucleotide
gtgtacccacaaaagaggcc

SEQ ID NO: 10330 - DNA, 20 bp, Artificial Sequence
  Description of Artificial Sequence: Synthetic oligonucleotide
tgtacccacaaaagaggccc

SEQ ID NO: 10331 - DNA, 20 bp, Artificial Sequence
  Description of Artificial Sequence: Synthetic oligonucleotide
gtacccacaaaagaggcccc

SEQ ID NO: 10332 - DNA, 20 bp, Artificial Sequence
  Description of Artificial Sequence: Synthetic oligonucleotide
tacccacaaaagaggcccca

SEQ ID NO: 10333 - DNA, 20 bp, Artificial Sequence
  Description of Artificial Sequence: Synthetic oligonucleotide
acccacaaaagaggccccag

SEQ ID NO: 10334 - DNA, 20 bp, Artificial Sequence
  Description of Artificial Sequence: Synthetic oligonucleotide
cccacaaaagaggccccagt

SEQ ID NO: 10335 - DNA, 20 bp, Artificial Sequence
  Description of Artificial Sequence: Synthetic oligonucleotide
ccacaaaagaggccccagta

SEQ ID NO: 10336 - DNA, 20 bp, Artificial Sequence
  Description of Artificial Sequence: Synthetic oligonucleotide
cacaaaagaggccccagtag

SEQ ID NO: 10337 - DNA, 20 bp, Artificial Sequence
  Description of Artificial Sequence: Synthetic oligonucleotide
acaaaagaggccccagtagt

SEQ ID NO: 10338 - DNA, 20 bp, Artificial Sequence
  Description of Artificial Sequence: Synthetic oligonucleotide
caaaagaggccccagtagtg

SEQ ID NO: 10339 - DNA, 20 bp, Artificial Sequence
  Description of Artificial Sequence: Synthetic oligonucleotide
aaaagaggccccagtagtgg

SEQ ID NO: 10340 - DNA, 20 bp, Artificial Sequence
  Description of Artificial Sequence: Synthetic oligonucleotide
aaagaggccccagtagtggt

SEQ ID NO: 10341 - DNA, 20 bp, Artificial Sequence
  Description of Artificial Sequence: Synthetic oligonucleotide
aagaggccccagtagtggtt

SEQ ID NO: 10342 - DNA, 20 bp, Artificial Sequence
  Description of Artificial Sequence: Synthetic oligonucleotide
agaggccccagtagtggttc

SEQ ID NO: 10343 - DNA, 20 bp, Artificial Sequence
  Description of Artificial Sequence: Synthetic oligonucleotide
gaggccccagtagtggttct

SEQ ID NO: 10344 - DNA, 20 bp, Artificial Sequence
  Description of Artificial Sequence: Synthetic oligonucleotide
aggccccagtagtggttctg

SEQ ID NO: 10345 - DNA, 20 bp, Artificial Sequence
  Description of Artificial Sequence: Synthetic oligonucleotide
ggccccagtagtggttctga

SEQ ID NO: 10346 - DNA, 20 bp, Artificial Sequence
  Description of Artificial Sequence: Synthetic oligonucleotide
gccccagtagtggttctgat

SEQ ID NO: 10347 - DNA, 20 bp, Artificial Sequence
  Description of Artificial Sequence: Synthetic oligonucleotide
ccccagtagtggttctgatg

SEQ ID NO: 10348 - DNA, 20 bp, Artificial Sequence
  Description of Artificial Sequence: Synthetic oligonucleotide
cccagtagtggttctgatga

SEQ ID NO: 10349 - DNA, 20 bp, Artificial Sequence
  Description of Artificial Sequence: Synthetic oligonucleotide
ccagtagtggttctgatgac

SEQ ID NO: 10350 - DNA, 20 bp, Artificial Sequence
  Description of Artificial Sequence: Synthetic oligonucleotide
cagtagtggttctgatgacc

SEQ ID NO: 10351 - DNA, 20 bp, Artificial Sequence
  Description of Artificial Sequence: Synthetic oligonucleotide
agtagtggttctgatgacca

SEQ ID NO: 10352 - DNA, 20 bp, Artificial Sequence
  Description of Artificial Sequence: Synthetic oligonucleotide
gtagtggttctgatgaccag

SEQ ID NO: 10353 - DNA, 20 bp, Artificial Sequence
  Description of Artificial Sequence: Synthetic oligonucleotide
tagtggttctgatgaccagg

SEQ ID NO: 10354 - DNA, 20 bp, Artificial Sequence
  Description of Artificial Sequence: Synthetic oligonucleotide
agtggttctgatgaccagga

SEQ ID NO: 10355 - DNA, 20 bp, Artificial Sequence
  Description of Artificial Sequence: Synthetic oligonucleotide
gtggttctgatgaccaggat

SEQ ID NO: 10356 - DNA, 20 bp, Artificial Sequence
  Description of Artificial Sequence: Synthetic oligonucleotide
tggttctgatgaccaggata

SEQ ID NO: 10357 - DNA, 20 bp, Artificial Sequence
  Description of Artificial Sequence: Synthetic oligonucleotide
ggttctgatgaccaggatat

SEQ ID NO: 10358 - DNA, 20 bp, Artificial Sequence
  Description of Artificial Sequence: Synthetic oligonucleotide
gttctgatgaccaggatatg

SEQ ID NO: 10359 - DNA, 20 bp, Artificial Sequence
  Description of Artificial Sequence: Synthetic oligonucleotide
ttctgatgaccaggatatgt

SEQ ID NO: 10360 - DNA, 20 bp, Artificial Sequence
  Description of Artificial Sequence: Synthetic oligonucleotide
tctgatgaccaggatatgta

SEQ ID NO: 10361 - DNA, 20 bp, Artificial Sequence
  Description of Artificial Sequence: Synthetic oligonucleotide
ctgatgaccaggatatgtag

SEQ ID NO: 10362 - DNA, 20 bp, Artificial Sequence
  Description of Artificial Sequence: Synthetic oligonucleotide
tgatgaccaggatatgtaga

SEQ ID NO: 10363 - DNA, 20 bp, Artificial Sequence
  Description of Artificial Sequence: Synthetic oligonucleotide
gatgaccaggatatgtagaa

SEQ ID NO: 10364 - DNA, 20 bp, Artificial Sequence
  Description of Artificial Sequence: Synthetic oligonucleotide
atgaccaggatatgtagaag

SEQ ID NO: 10365 - DNA, 20 bp, Artificial Sequence
  Description of Artificial Sequence: Synthetic oligonucleotide
tgaccaggatatgtagaagc

SEQ ID NO: 10366 - DNA, 20 bp, Artificial Sequence
  Description of Artificial Sequence: Synthetic oligonucleotide
gaccaggatatgtagaagca

SEQ ID NO: 10367 - DNA, 20 bp, Artificial Sequence
  Description of Artificial Sequence: Synthetic oligonucleotide
accaggatatgtagaagcag

SEQ ID NO: 10368 - DNA, 20 bp, Artificial Sequence
  Description of Artificial Sequence: Synthetic oligonucleotide
ccaggatatgtagaagcagt

SEQ ID NO: 10369 - DNA, 20 bp, Artificial Sequence
  Description of Artificial Sequence: Synthetic oligonucleotide
caggatatgtagaagcagtg

SEQ ID NO: 10370 - DNA, 20 bp, Artificial Sequence
  Description of Artificial Sequence: Synthetic oligonucleotide
aggatatgtagaagcagtgc

SEQ ID NO: 10371 - DNA, 20 bp, Artificial Sequence
  Description of Artificial Sequence: Synthetic oligonucleotide
ggatatgtagaagcagtgct

SEQ ID NO: 10372 - DNA, 20 bp, Artificial Sequence
  Description of Artificial Sequence: Synthetic oligonucleotide
gatatgtagaagcagtgctg

SEQ ID NO: 10373 - DNA, 20 bp, Artificial Sequence
  Description of Artificial Sequence: Synthetic oligonucleotide
atatgtagaagcagtgctgt

SEQ ID NO: 10374 - DNA, 20 bp, Artificial Sequence
  Description of Artificial Sequence: Synthetic oligonucleotide
tatgtagaagcagtgctgta

SEQ ID NO: 10375 - DNA, 20 bp, Artificial Sequence
  Description of Artificial Sequence: Synthetic oligonucleotide
atgtagaagcagtgctgtag

SEQ ID NO: 10376 - DNA, 20 bp, Artificial Sequence
  Description of Artificial Sequence: Synthetic oligonucleotide
tgtagaagcagtgctgtaga

SEQ ID NO: 10377 - DNA, 20 bp, Artificial Sequence
  Description of Artificial Sequence: Synthetic oligonucleotide
gtagaagcagtgctgtagat

SEQ ID NO: 10378 - DNA, 20 bp, Artificial Sequence
  Description of Artificial Sequence: Synthetic oligonucleotide
tagaagcagtgctgtagatg

SEQ ID NO: 10379 - DNA, 20 bp, Artificial Sequence
  Description of Artificial Sequence: Synthetic oligonucleotide
agaagcagtgctgtagatgg

SEQ ID NO: 10380 - DNA, 20 bp, Artificial Sequence
  Description of Artificial Sequence: Synthetic oligonucleotide
gaagcagtgctgtagatggg

SEQ ID NO: 10381 - DNA, 20 bp, Artificial Sequence
  Description of Artificial Sequence: Synthetic oligonucleotide
aagcagtgctgtagatgggg

SEQ ID NO: 10382 - DNA, 20 bp, Artificial Sequence
  Description of Artificial Sequence: Synthetic oligonucleotide
agcagtgctgtagatgggga

SEQ ID NO: 10383 - DNA, 20 bp, Artificial Sequence
  Description of Artificial Sequence: Synthetic oligonucleotide
gcagtgctgtagatggggag

SEQ ID NO: 10384 - DNA, 20 bp, Artificial Sequence
  Description of Artificial Sequence: Synthetic oligonucleotide
cagtgctgtagatggggagg

SEQ ID NO: 10385 - DNA, 20 bp, Artificial Sequence
  Description of Artificial Sequence: Synthetic oligonucleotide
agtgctgtagatggggaggc

SEQ ID NO: 10386 - DNA, 20 bp, Artificial Sequence
  Description of Artificial Sequence: Synthetic oligonucleotide
gtgctgtagatggggaggca

SEQ ID NO: 10387 - DNA, 20 bp, Artificial Sequence
  Description of Artificial Sequence: Synthetic oligonucleotide
tgctgtagatggggaggcac

SEQ ID NO: 10388 - DNA, 20 bp, Artificial Sequence
  Description of Artificial Sequence: Synthetic oligonucleotide
gctgtagatggggaggcact

SEQ ID NO: 10389 - DNA, 20 bp, Artificial Sequence
  Description of Artificial Sequence: Synthetic oligonucleotide
ctgtagatggggaggcactc

SEQ ID NO: 10390 - DNA, 20 bp, Artificial Sequence
  Description of Artificial Sequence: Synthetic oligonucleotide
tgtagatggggaggcactcc

SEQ ID NO: 10391 - DNA, 20 bp, Artificial Sequence
  Description of Artificial Sequence: Synthetic oligonucleotide
gtagatggggaggcactcca

SEQ ID NO: 10392 - DNA, 20 bp, Artificial Sequence
  Description of Artificial Sequence: Synthetic oligonucleotide
tagatggggaggcactccac

SEQ ID NO: 10393 - DNA, 20 bp, Artificial Sequence
  Description of Artificial Sequence: Synthetic oligonucleotide
agatggggaggcactccacg

SEQ ID NO: 10394 - DNA, 20 bp, Artificial Sequence
  Description of Artificial Sequence: Synthetic oligonucleotide
gatggggaggcactccacgc

SEQ ID NO: 10395 - DNA, 20 bp, Artificial Sequence
  Description of Artificial Sequence: Synthetic oligonucleotide
atggggaggcactccacgct

SEQ ID NO: 10396 - DNA, 20 bp, Artificial Sequence
  Description of Artificial Sequence: Synthetic oligonucleotide
tggggaggcactccacgctc

SEQ ID NO: 10397 - DNA, 20 bp, Artificial Sequence
  Description of Artificial Sequence: Synthetic oligonucleotide
ggggaggcactccacgctcc

SEQ ID NO: 10398 - DNA, 20 bp, Artificial Sequence
  Description of Artificial Sequence: Synthetic oligonucleotide
gggaggcactccacgctccc

SEQ ID NO: 10399 - DNA, 20 bp, Artificial Sequence
  Description of Artificial Sequence: Synthetic oligonucleotide
ggaggcactccacgctccct

SEQ ID NO: 10400 - DNA, 20 bp, Artificial Sequence
  Description of Artificial Sequence: Synthetic oligonucleotide
gaggcactccacgctccctc

SEQ ID NO: 10401 - DNA, 20 bp, Artificial Sequence
  Description of Artificial Sequence: Synthetic oligonucleotide
aggcactccacgctccctca

SEQ ID NO: 10402 - DNA, 20 bp, Artificial Sequence
  Description of Artificial Sequence: Synthetic oligonucleotide
ggcactccacgctccctcag

SEQ ID NO: 10403 - DNA, 20 bp, Artificial Sequence
  Description of Artificial Sequence: Synthetic oligonucleotide
gcactccacgctccctcagg

SEQ ID NO: 10404 - DNA, 20 bp, Artificial Sequence
  Description of Artificial Sequence: Synthetic oligonucleotide
cactccacgctccctcaggg

SEQ ID NO: 10405 - DNA, 20 bp, Artificial Sequence
  Description of Artificial Sequence: Synthetic oligonucleotide
actccacgctccctcagggg

SEQ ID NO: 10406 - DNA, 20 bp, Artificial Sequence
  Description of Artificial Sequence: Synthetic oligonucleotide
ctccacgctccctcagggga

SEQ ID NO: 10407 - DNA, 20 bp, Artificial Sequence
  Description of Artificial Sequence: Synthetic oligonucleotide
tccacgctccctcaggggac

SEQ ID NO: 10408 - DNA, 20 bp, Artificial Sequence
  Description of Artificial Sequence: Synthetic oligonucleotide
ccacgctccctcaggggact

SEQ ID NO: 10409 - DNA, 20 bp, Artificial Sequence
  Description of Artificial Sequence: Synthetic oligonucleotide
cacgctccctcaggggactg

SEQ ID NO: 10410 - DNA, 20 bp, Artificial Sequence
  Description of Artificial Sequence: Synthetic oligonucleotide
acgctccctcaggggactgg

SEQ ID NO: 10411 - DNA, 20 bp, Artificial Sequence
  Description of Artificial Sequence: Synthetic oligonucleotide
cgctccctcaggggactggt

SEQ ID NO: 10412 - DNA, 20 bp, Artificial Sequence
  Description of Artificial Sequence: Synthetic oligonucleotide
gctccctcaggggactggtc

SEQ ID NO: 10413 - DNA, 20 bp, Artificial Sequence
  Description of Artificial Sequence: Synthetic oligonucleotide
ctccctcaggggactggtct

SEQ ID NO: 10414 - DNA, 20 bp, Artificial Sequence
  Description of Artificial Sequence: Synthetic oligonucleotide
tccctcaggggactggtctc

SEQ ID NO: 10415 - DNA, 20 bp, Artificial Sequence
  Description of Artificial Sequence: Synthetic oligonucleotide
ccctcaggggactggtctcc

SEQ ID NO: 10416 - DNA, 20 bp, Artificial Sequence
  Description of Artificial Sequence: Synthetic oligonucleotide
cctcaggggactggtctcct

SEQ ID NO: 10417 - DNA, 20 bp, Artificial Sequence
  Description of Artificial Sequence: Synthetic oligonucleotide
ctcaggggactggtctcctt

SEQ ID NO: 10418 - DNA, 20 bp, Artificial Sequence
  Description of Artificial Sequence: Synthetic oligonucleotide
tcaggggactggtctcctta

SEQ ID NO: 10419 - DNA, 20 bp, Artificial Sequence
  Description of Artificial Sequence: Synthetic oligonucleotide
caggggactggtctccttac

SEQ ID NO: 10420 - DNA, 20 bp, Artificial Sequence
  Description of Artificial Sequence: Synthetic oligonucleotide
aggggactggtctccttacc

SEQ ID NO: 10421 - DNA, 20 bp, Artificial Sequence
  Description of Artificial Sequence: Synthetic oligonucleotide
ggggactggtctccttacct

SEQ ID NO: 10422 - DNA, 20 bp, Artificial Sequence
  Description of Artificial Sequence: Synthetic oligonucleotide
gggactggtctccttacctg

SEQ ID NO: 10423 - DNA, 20 bp, Artificial Sequence
  Description of Artificial Sequence: Synthetic oligonucleotide
ggactggtctccttacctgc

SEQ ID NO: 10424 - DNA, 20 bp, Artificial Sequence
  Description of Artificial Sequence: Synthetic oligonucleotide
gactggtctccttacctgcg

SEQ ID NO: 10425 - DNA, 20 bp, Artificial Sequence
  Description of Artificial Sequence: Synthetic oligonucleotide
actggtctccttacctgcgg

SEQ ID NO: 10426 - DNA, 20 bp, Artificial Sequence
  Description of Artificial Sequence: Synthetic oligonucleotide
ctggtctccttacctgcgga

SEQ ID NO: 10427 - DNA, 20 bp, Artificial Sequence
  Description of Artificial Sequence: Synthetic oligonucleotide
tggtctccttacctgcggag

SEQ ID NO: 10428 - DNA, 20 bp, Artificial Sequence
  Description of Artificial Sequence: Synthetic oligonucleotide
ggtctccttacctgcggagg

SEQ ID NO: 10429 - DNA, 20 bp, Artificial Sequence
  Description of Artificial Sequence: Synthetic oligonucleotide
gtctccttacctgcggaggt

SEQ ID NO: 10430 - DNA, 20 bp, Artificial Sequence
  Description of Artificial Sequence: Synthetic oligonucleotide
tctccttacctgcggaggtc

SEQ ID NO: 10431 - DNA, 20 bp, Artificial Sequence
  Description of Artificial Sequence: Synthetic oligonucleotide
ctccttacctgcggaggtct

SEQ ID NO: 10432 - DNA, 20 bp, Artificial Sequence
  Description of Artificial Sequence: Synthetic oligonucleotide
tccttacctgcggaggtctg

SEQ ID NO: 10433 - DNA, 20 bp, Artificial Sequence
  Description of Artificial Sequence: Synthetic oligonucleotide
ccttacctgcggaggtctga

SEQ ID NO: 10434 - DNA, 20 bp, Artificial Sequence
  Description of Artificial Sequence: Synthetic oligonucleotide
cttacctgcggaggtctgag

SEQ ID NO: 10435 - DNA, 20 bp, Artificial Sequence
  Description of Artificial Sequence: Synthetic oligonucleotide
ttacctgcggaggtctgagt

SEQ ID NO: 10436 - DNA, 20 bp, Artificial Sequence
  Description of Artificial Sequence: Synthetic oligonucleotide
tacctgcggaggtctgagtg

SEQ ID NO: 10437 - DNA, 20 bp, Artificial Sequence
  Description of Artificial Sequence: Synthetic oligonucleotide
acctgcggaggtctgagtga

SEQ ID NO: 10438 - DNA, 20 bp, Artificial Sequence
  Description of Artificial Sequence: Synthetic oligonucleotide
cctgcggaggtctgagtgac

SEQ ID NO: 10439 - DNA, 20 bp, Artificial Sequence
  Description of Artificial Sequence: Synthetic oligonucleotide
ctgcggaggtctgagtgacc

SEQ ID NO: 10440 - DNA, 20 bp, Artificial Sequence
  Description of Artificial Sequence: Synthetic oligonucleotide
tgcggaggtctgagtgaccg

SEQ ID NO: 10441 - DNA, 20 bp, Artificial Sequence
  Description of Artificial Sequence: Synthetic oligonucleotide
gcggaggtctgagtgaccgt

SEQ ID NO: 10442 - DNA, 20 bp, Artificial Sequence
  Description of Artificial Sequence: Synthetic oligonucleotide
cggaggtctgagtgaccgtc

SEQ ID NO: 10443 - DNA, 20 bp, Artificial Sequence
  Description of Artificial Sequence: Synthetic oligonucleotide
ggaggtctgagtgaccgtct

SEQ ID NO: 10444 - DNA, 20 bp, Artificial Sequence
  Description of Artificial Sequence: Synthetic oligonucleotide
gaggtctgagtgaccgtctg

SEQ ID NO: 10445 - DNA, 20 bp, Artificial Sequence
  Description of Artificial Sequence: Synthetic oligonucleotide
aggtctgagtgaccgtctgt

SEQ ID NO: 10446 - DNA, 20 bp, Artificial Sequence
  Description of Artificial Sequence: Synthetic oligonucleotide
ggtctgagtgaccgtctgtg

SEQ ID NO: 10447 - DNA, 20 bp, Artificial Sequence
  Description of Artificial Sequence: Synthetic oligonucleotide
gtctgagtgaccgtctgtgc

SEQ ID NO: 10448 - DNA, 20 bp, Artificial Sequence
  Description of Artificial Sequence: Synthetic oligonucleotide
tctgagtgaccgtctgtgct

SEQ ID NO: 10449 - DNA, 20 bp, Artificial Sequence
  Description of Artificial Sequence: Synthetic oligonucleotide
ctgagtgaccgtctgtgctg

SEQ ID NO: 10450 - DNA, 20 bp, Artificial Sequence
  Description of Artificial Sequence: Synthetic oligonucleotide
tgagtgaccgtctgtgctgc

SEQ ID NO: 10451 - DNA, 20 bp, Artificial Sequence
  Description of Artificial Sequence: Synthetic oligonucleotide
gagtgaccgtctgtgctgcc

SEQ ID NO: 10452 - DNA, 20 bp, Artificial Sequence
  Description of Artificial Sequence: Synthetic oligonucleotide
agtgaccgtctgtgctgcct

SEQ ID NO: 10453 - DNA, 20 bp, Artificial Sequence
  Description of Artificial Sequence: Synthetic oligonucleotide
gtgaccgtctgtgctgcctg

SEQ ID NO: 10454 - DNA, 20 bp, Artificial Sequence
  Description of Artificial Sequence: Synthetic oligonucleotide
tgaccgtctgtgctgcctgc

SEQ ID NO: 10455 - DNA, 20 bp, Artificial Sequence
  Description of Artificial Sequence: Synthetic oligonucleotide
gaccgtctgtgctgcctgca

SEQ ID NO: 10456 - DNA, 20 bp, Artificial Sequence
  Description of Artificial Sequence: Synthetic oligonucleotide
accgtctgtgctgcctgcag

SEQ ID NO: 10457 - DNA, 20 bp, Artificial Sequence
  Description of Artificial Sequence: Synthetic oligonucleotide
ccgtctgtgctgcctgcagc

SEQ ID NO: 10458 - DNA, 20 bp, Artificial Sequence
  Description of Artificial Sequence: Synthetic oligonucleotide
cgtctgtgctgcctgcagct

SEQ ID NO: 10459 - DNA, 20 bp, Artificial Sequence
  Description of Artificial Sequence: Synthetic oligonucleotide
gtctgtgctgcctgcagctg

SEQ ID NO: 10460 - DNA, 20 bp, Artificial Sequence
  Description of Artificial Sequence: Synthetic oligonucleotide
tctgtgctgcctgcagctgc

SEQ ID NO: 10461 - DNA, 20 bp, Artificial Sequence
  Description of Artificial Sequence: Synthetic oligonucleotide
ctgtgctgcctgcagctgca

SEQ ID NO: 10462 - DNA, 20 bp, Artificial Sequence
  Description of Artificial Sequence: Synthetic oligonucleotide
tgtgctgcctgcagctgcat

SEQ ID NO: 10463 - DNA, 20 bp, Artificial Sequence
  Description of Artificial Sequence: Synthetic oligonucleotide
gtgctgcctgcagctgcatg

SEQ ID NO: 10464 - DNA, 20 bp, Artificial Sequence
  Description of Artificial Sequence: Synthetic oligonucleotide
tgctgcctgcagctgcatga

SEQ ID NO: 10465 - DNA, 20 bp, Artificial Sequence
  Description of Artificial Sequence: Synthetic oligonucleotide
gctgcctgcagctgcatgat

SEQ ID NO: 10466 - DNA, 20 bp, Artificial Sequence
  Description of Artificial Sequence: Synthetic oligonucleotide
ctgcctgcagctgcatgatg

SEQ ID NO: 10467 - DNA, 20 bp, Artificial Sequence
  Description of Artificial Sequence: Synthetic oligonucleotide
tgcctgcagctgcatgatgt

SEQ ID NO: 10468 - DNA, 20 bp, Artificial Sequence
  Description of Artificial Sequence: Synthetic oligonucleotide
gcctgcagctgcatgatgtc

SEQ ID NO: 10469 - DNA, 20 bp, Artificial Sequence
  Description of Artificial Sequence: Synthetic oligonucleotide
cctgcagctgcatgatgtca

SEQ ID NO: 10470 - DNA, 20 bp, Artificial Sequence
  Description of Artificial Sequence: Synthetic oligonucleotide
ctgcagctgcatgatgtcaa

SEQ ID NO: 10471 - DNA, 20 bp, Artificial Sequence
  Description of Artificial Sequence: Synthetic oligonucleotide
tgcagctgcatgatgtcaat

SEQ ID NO: 10472 - DNA, 20 bp, Artificial Sequence
  Description of Artificial Sequence: Synthetic oligonucleotide
gcagctgcatgatgtcaatt

SEQ ID NO: 10473 - DNA, 20 bp, Artificial Sequence
  Description of Artificial Sequence: Synthetic oligonucleotide
cagctgcatgatgtcaattt

SEQ ID NO: 10474 - DNA, 20 bp, Artificial Sequence
  Description of Artificial Sequence: Synthetic oligonucleotide
agctgcatgatgtcaatttg

SEQ ID NO: 10475 - DNA, 20 bp, Artificial Sequence
  Description of Artificial Sequence: Synthetic oligonucleotide
gctgcatgatgtcaatttgg

SEQ ID NO: 10476 - DNA, 20 bp, Artificial Sequence
  Description of Artificial Sequence: Synthetic oligonucleotide
ctgcatgatgtcaatttggt

SEQ ID NO: 10477 - DNA, 20 bp, Artificial Sequence
  Description of Artificial Sequence: Synthetic oligonucleotide
tgcatgatgtcaatttggtt

SEQ ID NO: 10478 - DNA, 20 bp, Artificial Sequence
  Description of Artificial Sequence: Synthetic oligonucleotide
gcatgatgtcaatttggttg

SEQ ID NO: 10479 - DNA, 20 bp, Artificial Sequence
  Description of Artificial Sequence: Synthetic oligonucleotide
catgatgtcaatttggttgt

SEQ ID NO: 10480 - DNA, 20 bp, Artificial Sequence
  Description of Artificial Sequence: Synthetic oligonucleotide
atgatgtcaatttggttgtt

SEQ ID NO: 10481 - DNA, 20 bp, Artificial Sequence
  Description of Artificial Sequence: Synthetic oligonucleotide
tgatgtcaatttggttgttc

SEQ ID NO: 10482 - DNA, 20 bp, Artificial Sequence
  Description of Artificial Sequence: Synthetic oligonucleotide
gatgtcaatttggttgttca

SEQ ID NO: 10483 - DNA, 20 bp, Artificial Sequence
  Description of Artificial Sequence: Synthetic oligonucleotide
atgtcaatttggttgttcat

SEQ ID NO: 10484 - DNA, 20 bp, Artificial Sequence
  Description of Artificial Sequence: Synthetic oligonucleotide
tgtcaatttggttgttcatc

SEQ ID NO: 10485 - DNA, 20 bp, Artificial Sequence
  Description of Artificial Sequence: Synthetic oligonucleotide
gtcaatttggttgttcatct

SEQ ID NO: 10486 - DNA, 20 bp, Artificial Sequence
  Description of Artificial Sequence: Synthetic oligonucleotide
tcaatttggttgttcatctc

SEQ ID NO: 10487 - DNA, 20 bp, Artificial Sequence
  Description of Artificial Sequence: Synthetic oligonucleotide
caatttggttgttcatctcg

SEQ ID NO: 10488 - DNA, 20 bp, Artificial Sequence
  Description of Artificial Sequence: Synthetic oligonucleotide
aatttggttgttcatctcgg

SEQ ID NO: 10489 - DNA, 20 bp, Artificial Sequence
  Description of Artificial Sequence: Synthetic oligonucleotide
atttggttgttcatctcgga

SEQ ID NO: 10490 - DNA, 20 bp, Artificial Sequence
  Description of Artificial Sequence: Synthetic oligonucleotide
tttggttgttcatctcggag

SEQ ID NO: 10491 - DNA, 20 bp, Artificial Sequence
  Description of Artificial Sequence: Synthetic oligonucleotide
ttggttgttcatctcggagt

SEQ ID NO: 10492 - DNA, 20 bp, Artificial Sequence
  Description of Artificial Sequence: Synthetic oligonucleotide
tggttgttcatctcggagta

SEQ ID NO: 10493 - DNA, 20 bp, Artificial Sequence
  Description of Artificial Sequence: Synthetic oligonucleotide
ggttgttcatctcggagtac

SEQ ID NO: 10494 - DNA, 20 bp, Artificial Sequence
  Description of Artificial Sequence: Synthetic oligonucleotide
gttgttcatctcggagtact

SEQ ID NO: 10495 - DNA, 20 bp, Artificial Sequence
  Description of Artificial Sequence: Synthetic oligonucleotide
ttgttcatctcggagtactt

SEQ ID NO: 10496 - DNA, 20 bp, Artificial Sequence
  Description of Artificial Sequence: Synthetic oligonucleotide
tgttcatctcggagtacttg

SEQ ID NO: 10497 - DNA, 20 bp, Artificial Sequence
  Description of Artificial Sequence: Synthetic oligonucleotide
gttcatctcggagtacttgc

SEQ ID NO: 10498 - DNA, 20 bp, Artificial Sequence
  Description of Artificial Sequence: Synthetic oligonucleotide
ttcatctcggagtacttgct

SEQ ID NO: 10499 - DNA, 20 bp, Artificial Sequence
  Description of Artificial Sequence: Synthetic oligonucleotide
tcatctcggagtacttgctc

SEQ ID NO: 10500 - DNA, 20 bp, Artificial Sequence
  Description of Artificial Sequence: Synthetic oligonucleotide
catctcggagtacttgctct

SEQ ID NO: 10501 - DNA, 20 bp, Artificial Sequence
  Description of Artificial Sequence: Synthetic oligonucleotide
atctcggagtacttgctctc

SEQ ID NO: 10502 - DNA, 20 bp, Artificial Sequence
  Description of Artificial Sequence: Synthetic oligonucleotide
tctcggagtacttgctctca

SEQ ID NO: 10503 - DNA, 20 bp, Artificial Sequence
  Description of Artificial Sequence: Synthetic oligonucleotide
ctcggagtacttgctctcag

SEQ ID NO: 10504 - DNA, 20 bp, Artificial Sequence
  Description of Artificial Sequence: Synthetic oligonucleotide
tcggagtacttgctctcagc

SEQ ID NO: 10505 - DNA, 20 bp, Artificial Sequence
  Description of Artificial Sequence: Synthetic oligonucleotide
cggagtacttgctctcagca

SEQ ID NO: 10506 - DNA, 20 bp, Artificial Sequence
  Description of Artificial Sequence: Synthetic oligonucleotide
ggagtacttgctctcagcat

SEQ ID NO: 10507 - DNA, 20 bp, Artificial Sequence
  Description of Artificial Sequence: Synthetic oligonucleotide
gagtacttgctctcagcatc

SEQ ID NO: 10508 - DNA, 20 bp, Artificial Sequence
  Description of Artificial Sequence: Synthetic oligonucleotide
agtacttgctctcagcatct

SEQ ID NO: 10509 - DNA, 20 bp, Artificial Sequence
  Description of Artificial Sequence: Synthetic oligonucleotide
gtacttgctctcagcatctg

SEQ ID NO: 10510 - DNA, 20 bp, Artificial Sequence
  Description of Artificial Sequence: Synthetic oligonucleotide
tacttgctctcagcatctgt

SEQ ID NO: 10511 - DNA, 20 bp, Artificial Sequence
  Description of Artificial Sequence: Synthetic oligonucleotide
acttgctctcagcatctgtg

SEQ ID NO: 10512 - DNA, 20 bp, Artificial Sequence
  Description of Artificial Sequence: Synthetic oligonucleotide
cttgctctcagcatctgtga

SEQ ID NO: 10513 - DNA, 20 bp, Artificial Sequence
  Description of Artificial Sequence: Synthetic oligonucleotide
ttgctctcagcatctgtgag

SEQ ID NO: 10514 - DNA, 20 bp, Artificial Sequence
  Description of Artificial Sequence: Synthetic oligonucleotide
tgctctcagcatctgtgagc

SEQ ID NO: 10515 - DNA, 20 bp, Artificial Sequence
  Description of Artificial Sequence: Synthetic oligonucleotide
gctctcagcatctgtgagcc

SEQ ID NO: 10516 - DNA, 20 bp, Artificial Sequence
  Description of Artificial Sequence: Synthetic oligonucleotide
ctctcagcatctgtgagccg

SEQ ID NO: 10517 - DNA, 20 bp, Artificial Sequence
  Description of Artificial Sequence: Synthetic oligonucleotide
tctcagcatctgtgagccgc

SEQ ID NO: 10518 - DNA, 20 bp, Artificial Sequence
  Description of Artificial Sequence: Synthetic oligonucleotide
ctcagcatctgtgagccgcg

SEQ ID NO: 10519 - DNA, 20 bp, Artificial Sequence
  Description of Artificial Sequence: Synthetic oligonucleotide
tcagcatctgtgagccgcga

SEQ ID NO: 10520 - DNA, 20 bp, Artificial Sequence
  Description of Artificial Sequence: Synthetic oligonucleotide
cagcatctgtgagccgcgac

SEQ ID NO: 10521 - DNA, 20 bp, Artificial Sequence
  Description of Artificial Sequence: Synthetic oligonucleotide
agcatctgtgagccgcgact

SEQ ID NO: 10522 - DNA, 20 bp, Artificial Sequence
  Description of Artificial Sequence: Synthetic oligonucleotide
gcatctgtgagccgcgactc

SEQ ID NO: 10523 - DNA, 20 bp, Artificial Sequence
  Description of Artificial Sequence: Synthetic oligonucleotide
catctgtgagccgcgactcc

SEQ ID NO: 10524 - DNA, 20 bp, Artificial Sequence
  Description of Artificial Sequence: Synthetic oligonucleotide
atctgtgagccgcgactcca

SEQ ID NO: 10525 - DNA, 20 bp, Artificial Sequence
  Description of Artificial Sequence: Synthetic oligonucleotide
tctgtgagccgcgactccat

SEQ ID NO: 10526 - DNA, 20 bp, Artificial Sequence
  Description of Artificial Sequence: Synthetic oligonucleotide
ctgtgagccgcgactccatg

SEQ ID NO: 10527 - DNA, 20 bp, Artificial Sequence
  Description of Artificial Sequence: Synthetic oligonucleotide
tgtgagccgcgactccatgc

SEQ ID NO: 10528 - DNA, 20 bp, Artificial Sequence
  Description of Artificial Sequence: Synthetic oligonucleotide
gtgagccgcgactccatgcg

SEQ ID NO: 10529 - DNA, 20 bp, Artificial Sequence
  Description of Artificial Sequence: Synthetic oligonucleotide
tgagccgcgactccatgcgc

SEQ ID NO: 10530 - DNA, 20 bp, Artificial Sequence
  Description of Artificial Sequence: Synthetic oligonucleotide
gagccgcgactccatgcgct

SEQ ID NO: 10531 - DNA, 20 bp, Artificial Sequence
  Description of Artificial Sequence: Synthetic oligonucleotide
agccgcgactccatgcgctt

SEQ ID NO: 10532 - DNA, 20 bp, Artificial Sequence
  Description of Artificial Sequence: Synthetic oligonucleotide
gccgcgactccatgcgcttg

SEQ ID NO: 10533 - DNA, 20 bp, Artificial Sequence
  Description of Artificial Sequence: Synthetic oligonucleotide
ccgcgactccatgcgcttgc

SEQ ID NO: 10534 - DNA, 20 bp, Artificial Sequence
  Description of Artificial Sequence: Synthetic oligonucleotide
cgcgactccatgcgcttgct

SEQ ID NO: 10535 - DNA, 20 bp, Artificial Sequence
  Description of Artificial Sequence: Synthetic oligonucleotide
gcgactccatgcgcttgctg

SEQ ID NO: 10536 - DNA, 20 bp, Artificial Sequence
  Description of Artificial Sequence: Synthetic oligonucleotide
cgactccatgcgcttgctgt

SEQ ID NO: 10537 - DNA, 20 bp, Artificial Sequence
  Description of Artificial Sequence: Synthetic oligonucleotide
gactccatgcgcttgctgtt

SEQ ID NO: 10538 - DNA, 20 bp, Artificial Sequence
  Description of Artificial Sequence: Synthetic oligonucleotide
actccatgcgcttgctgttg

SEQ ID NO: 10539 - DNA, 20 bp, Artificial Sequence
  Description of Artificial Sequence: Synthetic oligonucleotide
ctccatgcgcttgctgttgc

SEQ ID NO: 10540 - DNA, 20 bp, Artificial Sequence
  Description of Artificial Sequence: Synthetic oligonucleotide
tccatgcgcttgctgttgct

SEQ ID NO: 10541 - DNA, 20 bp, Artificial Sequence
  Description of Artificial Sequence: Synthetic oligonucleotide
ccatgcgcttgctgttgctc

SEQ ID NO: 10542 - DNA, 20 bp, Artificial Sequence
  Description of Artificial Sequence: Synthetic oligonucleotide
catgcgcttgctgttgctct

SEQ ID NO: 10543 - DNA, 20 bp, Artificial Sequence
  Description of Artificial Sequence: Synthetic oligonucleotide
atgcgcttgctgttgctctc

SEQ ID NO: 10544 - DNA, 20 bp, Artificial Sequence
  Description of Artificial Sequence: Synthetic oligonucleotide
tgcgcttgctgttgctctcc

SEQ ID NO: 10545 - DNA, 20 bp, Artificial Sequence
  Description of Artificial Sequence: Synthetic oligonucleotide
gcgcttgctgttgctctcca

SEQ ID NO: 10546 - DNA, 20 bp, Artificial Sequence
  Description of Artificial Sequence: Synthetic oligonucleotide
cgcttgctgttgctctccag

SEQ ID NO: 10547 - DNA, 20 bp, Artificial Sequence
  Description of Artificial Sequence: Synthetic oligonucleotide
gcttgctgttgctctccagc

SEQ ID NO: 10548 - DNA, 20 bp, Artificial Sequence
  Description of Artificial Sequence: Synthetic oligonucleotide
cttgctgttgctctccagct

SEQ ID NO: 10549 - DNA, 20 bp, Artificial Sequence
  Description of Artificial Sequence: Synthetic oligonucleotide
ttgctgttgctctccagctc

SEQ ID NO: 10550 - DNA, 20 bp, Artificial Sequence
  Description of Artificial Sequence: Synthetic oligonucleotide
tgctgttgctctccagctcc

SEQ ID NO: 10551 - DNA, 20 bp, Artificial Sequence
  Description of Artificial Sequence: Synthetic oligonucleotide
gctgttgctctccagctcca

SEQ ID NO: 10552 - DNA, 20 bp, Artificial Sequence
  Description of Artificial Sequence: Synthetic oligonucleotide
ctgttgctctccagctccat

SEQ ID NO: 10553 - DNA, 20 bp, Artificial Sequence
  Description of Artificial Sequence: Synthetic oligonucleotide
tgttgctctccagctccatc

SEQ ID NO: 10554 - DNA, 20 bp, Artificial Sequence
  Description of Artificial Sequence: Synthetic oligonucleotide
gttgctctccagctccatca

SEQ ID NO: 10555 - DNA, 20 bp, Artificial Sequence
  Description of Artificial Sequence: Synthetic oligonucleotide
ttgctctccagctccatcac

SEQ ID NO: 10556 - DNA, 20 bp, Artificial Sequence
  Description of Artificial Sequence: Synthetic oligonucleotide
tgctctccagctccatcacc

SEQ ID NO: 10557 - DNA, 20 bp, Artificial Sequence
  Description of Artificial Sequence: Synthetic oligonucleotide
gctctccagctccatcacct

SEQ ID NO: 10558 - DNA, 20 bp, Artificial Sequence
  Description of Artificial Sequence: Synthetic oligonucleotide
ctctccagctccatcacctg

SEQ ID NO: 10559 - DNA, 20 bp, Artificial Sequence
  Description of Artificial Sequence: Synthetic oligonucleotide
tctccagctccatcacctgc

SEQ ID NO: 10560 - DNA, 20 bp, Artificial Sequence
  Description of Artificial Sequence: Synthetic oligonucleotide
ctccagctccatcacctgca

SEQ ID NO: 10561 - DNA, 20 bp, Artificial Sequence
  Description of Artificial Sequence: Synthetic oligonucleotide
tccagctccatcacctgcat

SEQ ID NO: 10562 - DNA, 20 bp, Artificial Sequence
  Description of Artificial Sequence: Synthetic oligonucleotide
ccagctccatcacctgcatg

SEQ ID NO: 10563 - DNA, 20 bp, Artificial Sequence
  Description of Artificial Sequence: Synthetic oligonucleotide
cagctccatcacctgcatga

SEQ ID NO: 10564 - DNA, 20 bp, Artificial Sequence
  Description of Artificial Sequence: Synthetic oligonucleotide
agctccatcacctgcatgac

SEQ ID NO: 10565 - DNA, 20 bp, Artificial Sequence
  Description of Artificial Sequence: Synthetic oligonucleotide
gctccatcacctgcatgacc

SEQ ID NO: 10566 - DNA, 20 bp, Artificial Sequence
  Description of Artificial Sequence: Synthetic oligonucleotide
ctccatcacctgcatgacca

SEQ ID NO: 10567 - DNA, 20 bp, Artificial Sequence
  Description of Artificial Sequence: Synthetic oligonucleotide
tccatcacctgcatgaccac

SEQ ID NO: 10568 - DNA, 20 bp, Artificial Sequence
  Description of Artificial Sequence: Synthetic oligonucleotide
ccatcacctgcatgaccacg

SEQ ID NO: 10569 - DNA, 20 bp, Artificial Sequence
  Description of Artificial Sequence: Synthetic oligonucleotide
catcacctgcatgaccacgc

SEQ ID NO: 10570 - DNA, 20 bp, Artificial Sequence
  Description of Artificial Sequence: Synthetic oligonucleotide
atcacctgcatgaccacgct

SEQ ID NO: 10571 - DNA, 20 bp, Artificial Sequence
  Description of Artificial Sequence: Synthetic oligonucleotide
tcacctgcatgaccacgctg

SEQ ID NO: 10572 - DNA, 20 bp, Artificial Sequence
  Description of Artificial Sequence: Synthetic oligonucleotide
cacctgcatgaccacgctga

SEQ ID NO: 10573 - DNA, 20 bp, Artificial Sequence
  Description of Artificial Sequence: Synthetic oligonucleotide
acctgcatgaccacgctgac

SEQ ID NO: 10574 - DNA, 20 bp, Artificial Sequence
  Description of Artificial Sequence: Synthetic oligonucleotide
cctgcatgaccacgctgacc

SEQ ID NO: 10575 - DNA, 20 bp, Artificial Sequence
  Description of Artificial Sequence: Synthetic oligonucleotide
ctgcatgaccacgctgaccc

SEQ ID NO: 10576 - DNA, 20 bp, Artificial Sequence
  Description of Artificial Sequence: Synthetic oligonucleotide
tgcatgaccacgctgaccca

SEQ ID NO: 10577 - DNA, 20 bp, Artificial Sequence
  Description of Artificial Sequence: Synthetic oligonucleotide
gcatgaccacgctgacccag

SEQ ID NO: 10578 - DNA, 20 bp, Artificial Sequence
  Description of Artificial Sequence: Synthetic oligonucleotide
catgaccacgctgacccagt

SEQ ID NO: 10579 - DNA, 20 bp, Artificial Sequence
  Description of Artificial Sequence: Synthetic oligonucleotide
atgaccacgctgacccagtc

SEQ ID NO: 10580 - DNA, 20 bp, Artificial Sequence
  Description of Artificial Sequence: Synthetic oligonucleotide
tgaccacgctgacccagtcc

SEQ ID NO: 10581 - DNA, 20 bp, Artificial Sequence
  Description of Artificial Sequence: Synthetic oligonucleotide
gaccacgctgacccagtccc

SEQ ID NO: 10582 - DNA, 20 bp, Artificial Sequence
  Description of Artificial Sequence: Synthetic oligonucleotide
accacgctgacccagtccct

SEQ ID NO: 10583 - DNA, 20 bp, Artificial Sequence
  Description of Artificial Sequence: Synthetic oligonucleotide
ccacgctgacccagtccctc

SEQ ID NO: 10584 - DNA, 20 bp, Artificial Sequence
  Description of Artificial Sequence: Synthetic oligonucleotide
cacgctgacccagtccctct

SEQ ID NO: 10585 - DNA, 20 bp, Artificial Sequence
  Description of Artificial Sequence: Synthetic oligonucleotide
acgctgacccagtccctctc

SEQ ID NO: 10586 - DNA, 20 bp, Artificial Sequence
  Description of Artificial Sequence: Synthetic oligonucleotide
cgctgacccagtccctctcc

SEQ ID NO: 10587 - DNA, 20 bp, Artificial Sequence
  Description of Artificial Sequence: Synthetic oligonucleotide
gctgacccagtccctctcct

SEQ ID NO: 10588 - DNA, 20 bp, Artificial Sequence
  Description of Artificial Sequence: Synthetic oligonucleotide
ctgacccagtccctctcctg

SEQ ID NO: 10589 - DNA, 20 bp, Artificial Sequence
  Description of Artificial Sequence: Synthetic oligonucleotide
tgacccagtccctctcctgc

SEQ ID NO: 10590 - DNA, 20 bp, Artificial Sequence
  Description of Artificial Sequence: Synthetic oligonucleotide
gacccagtccctctcctgct

SEQ ID NO: 10591 - DNA, 20 bp, Artificial Sequence
  Description of Artificial Sequence: Synthetic oligonucleotide
acccagtccctctcctgctt

SEQ ID NO: 10592 - DNA, 20 bp, Artificial Sequence
  Description of Artificial Sequence: Synthetic oligonucleotide
cccagtccctctcctgcttc

SEQ ID NO: 10593 - DNA, 20 bp, Artificial Sequence
  Description of Artificial Sequence: Synthetic oligonucleotide
ccagtccctctcctgcttct

SEQ ID NO: 10594 - DNA, 20 bp, Artificial Sequence
  Description of Artificial Sequence: Synthetic oligonucleotide
cagtccctctcctgcttctt

SEQ ID NO: 10595 - DNA, 20 bp, Artificial Sequence
  Description of Artificial Sequence: Synthetic oligonucleotide
agtccctctcctgcttcttg

SEQ ID NO: 10596 - DNA, 20 bp, Artificial Sequence
  Description of Artificial Sequence: Synthetic oligonucleotide
gtccctctcctgcttcttgt

SEQ ID NO: 10597 - DNA, 20 bp, Artificial Sequence
  Description of Artificial Sequence: Synthetic oligonucleotide
tccctctcctgcttcttgtt

SEQ ID NO: 10598 - DNA, 20 bp, Artificial Sequence
  Description of Artificial Sequence: Synthetic oligonucleotide
ccctctcctgcttcttgttc

SEQ ID NO: 10599 - DNA, 20 bp, Artificial Sequence
  Description of Artificial Sequence: Synthetic oligonucleotide
cctctcctgcttcttgttca

SEQ ID NO: 10600 - DNA, 20 bp, Artificial Sequence
  Description of Artificial Sequence: Synthetic oligonucleotide
ctctcctgcttcttgttcag

SEQ ID NO: 10601 - DNA, 20 bp, Artificial Sequence
  Description of Artificial Sequence: Synthetic oligonucleotide
tctcctgcttcttgttcagt

SEQ ID NO: 10602 - DNA, 20 bp, Artificial Sequence
  Description of Artificial Sequence: Synthetic oligonucleotide
ctcctgcttcttgttcagtt

SEQ ID NO: 10603 - DNA, 20 bp, Artificial Sequence
  Description of Artificial Sequence: Synthetic oligonucleotide
tcctgcttcttgttcagttc

SEQ ID NO: 10604 - DNA, 20 bp, Artificial Sequence
  Description of Artificial Sequence: Synthetic oligonucleotide
cctgcttcttgttcagttca

SEQ ID NO: 10605 - DNA, 20 bp, Artificial Sequence
  Description of Artificial Sequence: Synthetic oligonucleotide
ctgcttcttgttcagttcac

SEQ ID NO: 10606 - DNA, 20 bp, Artificial Sequence
  Description of Artificial Sequence: Synthetic oligonucleotide
tgcttcttgttcagttcact

SEQ ID NO: 10607 - DNA, 20 bp, Artificial Sequence
  Description of Artificial Sequence: Synthetic oligonucleotide
gcttcttgttcagttcactc

SEQ ID NO: 10608 - DNA, 20 bp, Artificial Sequence
  Description of Artificial Sequence: Synthetic oligonucleotide
cttcttgttcagttcactca

SEQ ID NO: 10609 - DNA, 20 bp, Artificial Sequence
  Description of Artificial Sequence: Synthetic oligonucleotide
ttcttgttcagttcactcag

SEQ ID NO: 10610 - DNA, 20 bp, Artificial Sequence
  Description of Artificial Sequence: Synthetic oligonucleotide
tcttgttcagttcactcagc

SEQ ID NO: 10611 - DNA, 20 bp, Artificial Sequence
  Description of Artificial Sequence: Synthetic oligonucleotide
cttgttcagttcactcagca

SEQ ID NO: 10612 - DNA, 20 bp, Artificial Sequence
  Description of Artificial Sequence: Synthetic oligonucleotide
ttgttcagttcactcagcag

SEQ ID NO: 10613 - DNA, 20 bp, Artificial Sequence
  Description of Artificial Sequence: Synthetic oligonucleotide
tgttcagttcactcagcagg

SEQ ID NO: 10614 - DNA, 20 bp, Artificial Sequence
  Description of Artificial Sequence: Synthetic oligonucleotide
gttcagttcactcagcaggc

SEQ ID NO: 10615 - DNA, 20 bp, Artificial Sequence
  Description of Artificial Sequence: Synthetic oligonucleotide
ttcagttcactcagcaggct

SEQ ID NO: 10616 - DNA, 20 bp, Artificial Sequence
  Description of Artificial Sequence: Synthetic oligonucleotide
tcagttcactcagcaggctg

SEQ ID NO: 10617 - DNA, 20 bp, Artificial Sequence
  Description of Artificial Sequence: Synthetic oligonucleotide
cagttcactcagcaggctgc

SEQ ID NO: 10618 - DNA, 20 bp, Artificial Sequence
  Description of Artificial Sequence: Synthetic oligonucleotide
agttcactcagcaggctgct

SEQ ID NO: 10619 - DNA, 20 bp, Artificial Sequence
  Description of Artificial Sequence: Synthetic oligonucleotide
gttcactcagcaggctgcta

SEQ ID NO: 10620 - DNA, 20 bp, Artificial Sequence
  Description of Artificial Sequence: Synthetic oligonucleotide
ttcactcagcaggctgctaa

SEQ ID NO: 10621 - DNA, 20 bp, Artificial Sequence
  Description of Artificial Sequence: Synthetic oligonucleotide
tcactcagcaggctgctaag

SEQ ID NO: 10622 - DNA, 20 bp, Artificial Sequence
  Description of Artificial Sequence: Synthetic oligonucleotide
cactcagcaggctgctaagg

SEQ ID NO: 10623 - DNA, 20 bp, Artificial Sequence
  Description of Artificial Sequence: Synthetic oligonucleotide
actcagcaggctgctaaggt

SEQ ID NO: 10624 - DNA, 20 bp, Artificial Sequence
  Description of Artificial Sequence: Synthetic oligonucleotide
ctcagcaggctgctaaggtt

SEQ ID NO: 10625 - DNA, 20 bp, Artificial Sequence
  Description of Artificial Sequence: Synthetic oligonucleotide
tcagcaggctgctaaggttg

SEQ ID NO: 10626 - DNA, 20 bp, Artificial Sequence
  Description of Artificial Sequence: Synthetic oligonucleotide
cagcaggctgctaaggttgg

SEQ ID NO: 10627 - DNA, 20 bp, Artificial Sequence
  Description of Artificial Sequence: Synthetic oligonucleotide
agcaggctgctaaggttggc

SEQ ID NO: 10628 - DNA, 20 bp, Artificial Sequence
  Description of Artificial Sequence: Synthetic oligonucleotide
gcaggctgctaaggttggca

SEQ ID NO: 10629 - DNA, 20 bp, Artificial Sequence
  Description of Artificial Sequence: Synthetic oligonucleotide
caggctgctaaggttggcaa

SEQ ID NO: 10630 - DNA, 20 bp, Artificial Sequence
  Description of Artificial Sequence: Synthetic oligonucleotide
aggctgctaaggttggcaac

SEQ ID NO: 10631 - DNA, 20 bp, Artificial Sequence
  Description of Artificial Sequence: Synthetic oligonucleotide
ggctgctaaggttggcaact

SEQ ID NO: 10632 - DNA, 20 bp, Artificial Sequence
  Description of Artificial Sequence: Synthetic oligonucleotide
gctgctaaggttggcaactt

SEQ ID NO: 10633 - DNA, 20 bp, Artificial Sequence
  Description of Artificial Sequence: Synthetic oligonucleotide
ctgctaaggttggcaacttg

SEQ ID NO: 10634 - DNA, 20 bp, Artificial Sequence
  Description of Artificial Sequence: Synthetic oligonucleotide
tgctaaggttggcaacttgg

SEQ ID NO: 10635 - DNA, 20 bp, Artificial Sequence
  Description of Artificial Sequence: Synthetic oligonucleotide
gctaaggttggcaacttggg

SEQ ID NO: 10636 - DNA, 20 bp, Artificial Sequence
  Description of Artificial Sequence: Synthetic oligonucleotide
ctaaggttggcaacttgggc

SEQ ID NO: 10637 - DNA, 20 bp, Artificial Sequence
  Description of Artificial Sequence: Synthetic oligonucleotide
taaggttggcaacttgggcc

SEQ ID NO: 10638 - DNA, 20 bp, Artificial Sequence
  Description of Artificial Sequence: Synthetic oligonucleotide
aaggttggcaacttgggcct

SEQ ID NO: 10639 - DNA, 20 bp, Artificial Sequence
  Description of Artificial Sequence: Synthetic oligonucleotide
aggttggcaacttgggcctt

SEQ ID NO: 10640 - DNA, 20 bp, Artificial Sequence
  Description of Artificial Sequence: Synthetic oligonucleotide
ggttggcaacttgggccttg

SEQ ID NO: 10641 - DNA, 20 bp, Artificial Sequence
  Description of Artificial Sequence: Synthetic oligonucleotide
gttggcaacttgggccttga

SEQ ID NO: 10642 - DNA, 20 bp, Artificial Sequence
  Description of Artificial Sequence: Synthetic oligonucleotide
ttggcaacttgggccttgag

SEQ ID NO: 10643 - DNA, 20 bp, Artificial Sequence
  Description of Artificial Sequence: Synthetic oligonucleotide
tggcaacttgggccttgagc

SEQ ID NO: 10644 - DNA, 20 bp, Artificial Sequence
  Description of Artificial Sequence: Synthetic oligonucleotide
ggcaacttgggccttgagct

SEQ ID NO: 10645 - DNA, 20 bp, Artificial Sequence
  Description of Artificial Sequence: Synthetic oligonucleotide
gcaacttgggccttgagctc

SEQ ID NO: 10646 - DNA, 20 bp, Artificial Sequence
  Description of Artificial Sequence: Synthetic oligonucleotide
caacttgggccttgagctcc

SEQ ID NO: 10647 - DNA, 20 bp, Artificial Sequence
  Description of Artificial Sequence: Synthetic oligonucleotide
aacttgggccttgagctcct

SEQ ID NO: 10648 - DNA, 20 bp, Artificial Sequence
  Description of Artificial Sequence: Synthetic oligonucleotide
acttgggccttgagctcctt

SEQ ID NO: 10649 - DNA, 20 bp, Artificial Sequence
  Description of Artificial Sequence: Synthetic oligonucleotide
cttgggccttgagctccttc

SEQ ID NO: 10650 - DNA, 20 bp, Artificial Sequence
  Description of Artificial Sequence: Synthetic oligonucleotide
ttgggccttgagctccttca

SEQ ID NO: 10651 - DNA, 20 bp, Artificial Sequence
  Description of Artificial Sequence: Synthetic oligonucleotide
tgggccttgagctccttcac

SEQ ID NO: 10652 - DNA, 20 bp, Artificial Sequence
  Description of Artificial Sequence: Synthetic oligonucleotide
gggccttgagctccttcacc

SEQ ID NO: 10653 - DNA, 20 bp, Artificial Sequence
  Description of Artificial Sequence: Synthetic oligonucleotide
ggccttgagctccttcacct

SEQ ID NO: 10654 - DNA, 20 bp, Artificial Sequence
  Description of Artificial Sequence: Synthetic oligonucleotide
gccttgagctccttcacctc

SEQ ID NO: 10655 - DNA, 20 bp, Artificial Sequence
  Description of Artificial Sequence: Synthetic oligonucleotide
ccttgagctccttcacctcc

SEQ ID NO: 10656 - DNA, 20 bp, Artificial Sequence
  Description of Artificial Sequence: Synthetic oligonucleotide
cttgagctccttcacctcct

SEQ ID NO: 10657 - DNA, 20 bp, Artificial Sequence
  Description of Artificial Sequence: Synthetic oligonucleotide
ttgagctccttcacctcctc

SEQ ID NO: 10658 - DNA, 20 bp, Artificial Sequence
  Description of Artificial Sequence: Synthetic oligonucleotide
tgagctccttcacctcctca

SEQ ID NO: 10659 - DNA, 20 bp, Artificial Sequence
  Description of Artificial Sequence: Synthetic oligonucleotide
gagctccttcacctcctcac

SEQ ID NO: 10660 - DNA, 20 bp, Artificial Sequence
  Description of Artificial Sequence: Synthetic oligonucleotide
agctccttcacctcctcaca

SEQ ID NO: 10661 - DNA, 20 bp, Artificial Sequence
  Description of Artificial Sequence: Synthetic oligonucleotide
gctccttcacctcctcacag

SEQ ID NO: 10662 - DNA, 20 bp, Artificial Sequence
  Description of Artificial Sequence: Synthetic oligonucleotide
ctccttcacctcctcacagc

SEQ ID NO: 10663 - DNA, 20 bp, Artificial Sequence
  Description of Artificial Sequence: Synthetic oligonucleotide
tccttcacctcctcacagca

SEQ ID NO: 10664 - DNA, 20 bp, Artificial Sequence
  Description of Artificial Sequence: Synthetic oligonucleotide
ccttcacctcctcacagcag

SEQ ID NO: 10665 - DNA, 20 bp, Artificial Sequence
  Description of Artificial Sequence: Synthetic oligonucleotide
cttcacctcctcacagcagt

SEQ ID NO: 10666 - DNA, 20 bp, Artificial Sequence
  Description of Artificial Sequence: Synthetic oligonucleotide
ttcacctcctcacagcagtt

SEQ ID NO: 10667 - DNA, 20 bp, Artificial Sequence
  Description of Artificial Sequence: Synthetic oligonucleotide
tcacctcctcacagcagttg

SEQ ID NO: 10668 - DNA, 20 bp, Artificial Sequence
  Description of Artificial Sequence: Synthetic oligonucleotide
cacctcctcacagcagttgg

SEQ ID NO: 10669 - DNA, 20 bp, Artificial Sequence
  Description of Artificial Sequence: Synthetic oligonucleotide
acctcctcacagcagttggc

SEQ ID NO: 10670 - DNA, 20 bp, Artificial Sequence
  Description of Artificial Sequence: Synthetic oligonucleotide
cctcctcacagcagttggcc

SEQ ID NO: 10671 - DNA, 20 bp, Artificial Sequence
  Description of Artificial Sequence: Synthetic oligonucleotide
ctcctcacagcagttggccg

SEQ ID NO: 10672 - DNA, 20 bp, Artificial Sequence
  Description of Artificial Sequence: Synthetic oligonucleotide
tcctcacagcagttggccgc

SEQ ID NO: 10673 - DNA, 20 bp, Artificial Sequence
  Description of Artificial Sequence: Synthetic oligonucleotide
cctcacagcagttggccgct

SEQ ID NO: 10674 - DNA, 20 bp, Artificial Sequence
  Description of Artificial Sequence: Synthetic oligonucleotide
ctcacagcagttggccgctt

SEQ ID NO: 10675 - DNA, 20 bp, Artificial Sequence
  Description of Artificial Sequence: Synthetic oligonucleotide
tcacagcagttggccgcttt

SEQ ID NO: 10676 - DNA, 20 bp, Artificial Sequence
  Description of Artificial Sequence: Synthetic oligonucleotide
cacagcagttggccgctttg

SEQ ID NO: 10677 - DNA, 20 bp, Artificial Sequence
  Description of Artificial Sequence: Synthetic oligonucleotide
acagcagttggccgctttga

SEQ ID NO: 10678 - DNA, 20 bp, Artificial Sequence
  Description of Artificial Sequence: Synthetic oligonucleotide
cagcagttggccgctttgag

SEQ ID NO: 10679 - DNA, 20 bp, Artificial Sequence
  Description of Artificial Sequence: Synthetic oligonucleotide
agcagttggccgctttgagc

SEQ ID NO: 10680 - DNA, 20 bp, Artificial Sequence
  Description of Artificial Sequence: Synthetic oligonucleotide
gcagttggccgctttgagct

SEQ ID NO: 10681 - DNA, 20 bp, Artificial Sequence
  Description of Artificial Sequence: Synthetic oligonucleotide
cagttggccgctttgagctg

SEQ ID NO: 10682 - DNA, 20 bp, Artificial Sequence
  Description of Artificial Sequence: Synthetic oligonucleotide
agttggccgctttgagctgt

SEQ ID NO: 10683 - DNA, 20 bp, Artificial Sequence
  Description of Artificial Sequence: Synthetic oligonucleotide
gttggccgctttgagctgtg

SEQ ID NO: 10684 - DNA, 20 bp, Artificial Sequence
  Description of Artificial Sequence: Synthetic oligonucleotide
ttggccgctttgagctgtgg

SEQ ID NO: 10685 - DNA, 20 bp, Artificial Sequence
  Description of Artificial Sequence: Synthetic oligonucleotide
tggccgctttgagctgtggc

SEQ ID NO: 10686 - DNA, 20 bp, Artificial Sequence
  Description of Artificial Sequence: Synthetic oligonucleotide
ggccgctttgagctgtggct

SEQ ID NO: 10687 - DNA, 20 bp, Artificial Sequence
  Description of Artificial Sequence: Synthetic oligonucleotide
gccgctttgagctgtggctg

SEQ ID NO: 10688 - DNA, 20 bp, Artificial Sequence
  Description of Artificial Sequence: Synthetic oligonucleotide
ccgctttgagctgtggctgt

SEQ ID NO: 10689 - DNA, 20 bp, Artificial Sequence
  Description of Artificial Sequence: Synthetic oligonucleotide
cgctttgagctgtggctgtg

SEQ ID NO: 10690 - DNA, 20 bp, Artificial Sequence
  Description of Artificial Sequence: Synthetic oligonucleotide
gctttgagctgtggctgtgc

SEQ ID NO: 10691 - DNA, 20 bp, Artificial Sequence
  Description of Artificial Sequence: Synthetic oligonucleotide
ctttgagctgtggctgtgct

SEQ ID NO: 10692 - DNA, 20 bp, Artificial Sequence
  Description of Artificial Sequence: Synthetic oligonucleotide
tttgagctgtggctgtgctg

SEQ ID NO: 10693 - DNA, 20 bp, Artificial Sequence
  Description of Artificial Sequence: Synthetic oligonucleotide
ttgagctgtggctgtgctgg

SEQ ID NO: 10694 - DNA, 20 bp, Artificial Sequence
  Description of Artificial Sequence: Synthetic oligonucleotide
tgagctgtggctgtgctggt

SEQ ID NO: 10695 - DNA, 20 bp, Artificial Sequence
  Description of Artificial Sequence: Synthetic oligonucleotide
gagctgtggctgtgctggtg

SEQ ID NO: 10696 - DNA, 20 bp, Artificial Sequence
  Description of Artificial Sequence: Synthetic oligonucleotide
agctgtggctgtgctggtgt

SEQ ID NO: 10697 - DNA, 20 bp, Artificial Sequence
  Description of Artificial Sequence: Synthetic oligonucleotide
gctgtggctgtgctggtgtc

SEQ ID NO: 10698 - DNA, 20 bp, Artificial Sequence
  Description of Artificial Sequence: Synthetic oligonucleotide
ctgtggctgtgctggtgtct

SEQ ID NO: 10699 - DNA, 20 bp, Artificial Sequence
  Description of Artificial Sequence: Synthetic oligonucleotide
tgtggctgtgctggtgtctt

SEQ ID NO: 10700 - DNA, 20 bp, Artificial Sequence
  Description of Artificial Sequence: Synthetic oligonucleotide
gtggctgtgctggtgtcttg

SEQ ID NO: 10701 - DNA, 20 bp, Artificial Sequence
  Description of Artificial Sequence: Synthetic oligonucleotide
tggctgtgctggtgtcttgt

SEQ ID NO: 10702 - DNA, 20 bp, Artificial Sequence
  Description of Artificial Sequence: Synthetic oligonucleotide
ggctgtgctggtgtcttgtg

SEQ ID NO: 10703 - DNA, 20 bp, Artificial Sequence
  Description of Artificial Sequence: Synthetic oligonucleotide
gctgtgctggtgtcttgtgc

SEQ ID NO: 10704 - DNA, 20 bp, Artificial Sequence
  Description of Artificial Sequence: Synthetic oligonucleotide
ctgtgctggtgtcttgtgct

SEQ ID NO: 10705 - DNA, 20 bp, Artificial Sequence
  Description of Artificial Sequence: Synthetic oligonucleotide
tgtgctggtgtcttgtgctt

SEQ ID NO: 10706 - DNA, 20 bp, Artificial Sequence
  Description of Artificial Sequence: Synthetic oligonucleotide
gtgctggtgtcttgtgctta

SEQ ID NO: 10707 - DNA, 20 bp, Artificial Sequence
  Description of Artificial Sequence: Synthetic oligonucleotide
tgctggtgtcttgtgcttag

SEQ ID NO: 10708 - DNA, 20 bp, Artificial Sequence
  Description of Artificial Sequence: Synthetic oligonucleotide
gctggtgtcttgtgcttaga

SEQ ID NO: 10709 - DNA, 20 bp, Artificial Sequence
  Description of Artificial Sequence: Synthetic oligonucleotide
ctggtgtcttgtgcttagag

SEQ ID NO: 10710 - DNA, 20 bp, Artificial Sequence
  Description of Artificial Sequence: Synthetic oligonucleotide
tggtgtcttgtgcttagaga

SEQ ID NO: 10711 - DNA, 20 bp, Artificial Sequence
  Description of Artificial Sequence: Synthetic oligonucleotide
ggtgtcttgtgcttagagag

SEQ ID NO: 10712 - DNA, 20 bp, Artificial Sequence
  Description of Artificial Sequence: Synthetic oligonucleotide
gtgtcttgtgcttagagagc

SEQ ID NO: 10713 - DNA, 20 bp, Artificial Sequence
  Description of Artificial Sequence: Synthetic oligonucleotide
tgtcttgtgcttagagagct

SEQ ID NO: 10714 - DNA, 20 bp, Artificial Sequence
  Description of Artificial Sequence: Synthetic oligonucleotide
gtcttgtgcttagagagctt

SEQ ID NO: 10715 - DNA, 20 bp, Artificial Sequence
  Description of Artificial Sequence: Synthetic oligonucleotide
tcttgtgcttagagagcttc

SEQ ID NO: 10716 - DNA, 20 bp, Artificial Sequence
  Description of Artificial Sequence: Synthetic oligonucleotide
cttgtgcttagagagcttct

SEQ ID NO: 10717 - DNA, 20 bp, Artificial Sequence
  Description of Artificial Sequence: Synthetic oligonucleotide
ttgtgcttagagagcttctg

SEQ ID NO: 10718 - DNA, 20 bp, Artificial Sequence
  Description of Artificial Sequence: Synthetic oligonucleotide
tgtgcttagagagcttctgc

SEQ ID NO: 10719 - DNA, 20 bp, Artificial Sequence
  Description of Artificial Sequence: Synthetic oligonucleotide
gtgcttagagagcttctgca

SEQ ID NO: 10720 - DNA, 20 bp, Artificial Sequence
  Description of Artificial Sequence: Synthetic oligonucleotide
tgcttagagagcttctgcag

SEQ ID NO: 10721 - DNA, 20 bp, Artificial Sequence
  Description of Artificial Sequence: Synthetic oligonucleotide
gcttagagagcttctgcagc

SEQ ID NO: 10722 - DNA, 20 bp, Artificial Sequence
  Description of Artificial Sequence: Synthetic oligonucleotide
cttagagagcttctgcagcc

SEQ ID NO: 10723 - DNA, 20 bp, Artificial Sequence
  Description of Artificial Sequence: Synthetic oligonucleotide
ttagagagcttctgcagcca

SEQ ID NO: 10724 - DNA, 20 bp, Artificial Sequence
  Description of Artificial Sequence: Synthetic oligonucleotide
tagagagcttctgcagccac

SEQ ID NO: 10725 - DNA, 20 bp, Artificial Sequence
  Description of Artificial Sequence: Synthetic oligonucleotide
agagagcttctgcagccacg

SEQ ID NO: 10726 - DNA, 20 bp, Artificial Sequence
  Description of Artificial Sequence: Synthetic oligonucleotide
gagagcttctgcagccacgc

SEQ ID NO: 10727 - DNA, 20 bp, Artificial Sequence
  Description of Artificial Sequence: Synthetic oligonucleotide
agagcttctgcagccacgct

SEQ ID NO: 10728 - DNA, 20 bp, Artificial Sequence
  Description of Artificial Sequence: Synthetic oligonucleotide
gagcttctgcagccacgctg

SEQ ID NO: 10729 - DNA, 20 bp, Artificial Sequence
  Description of Artificial Sequence: Synthetic oligonucleotide
agcttctgcagccacgctgg

SEQ ID NO: 10730 - DNA, 20 bp, Artificial Sequence
  Description of Artificial Sequence: Synthetic oligonucleotide
gcttctgcagccacgctggg

SEQ ID NO: 10731 - DNA, 20 bp, Artificial Sequence
  Description of Artificial Sequence: Synthetic oligonucleotide
cttctgcagccacgctgggt

SEQ ID NO: 10732 - DNA, 20 bp, Artificial Sequence
  Description of Artificial Sequence: Synthetic oligonucleotide
ttctgcagccacgctgggtg

SEQ ID NO: 10733 - DNA, 20 bp, Artificial Sequence
  Description of Artificial Sequence: Synthetic oligonucleotide
tctgcagccacgctgggtgg

SEQ ID NO: 10734 - DNA, 20 bp, Artificial Sequence
  Description of Artificial Sequence: Synthetic oligonucleotide
ctgcagccacgctgggtggc

SEQ ID NO: 10735 - DNA, 20 bp, Artificial Sequence
  Description of Artificial Sequence: Synthetic oligonucleotide
tgcagccacgctgggtggct

SEQ ID NO: 10736 - DNA, 20 bp, Artificial Sequence
  Description of Artificial Sequence: Synthetic oligonucleotide
gcagccacgctgggtggctg

SEQ ID NO: 10737 - DNA, 20 bp, Artificial Sequence
  Description of Artificial Sequence: Synthetic oligonucleotide
cagccacgctgggtggctga

SEQ ID NO: 10738 - DNA, 20 bp, Artificial Sequence
  Description of Artificial Sequence: Synthetic oligonucleotide
agccacgctgggtggctgac

SEQ ID NO: 10739 - DNA, 20 bp, Artificial Sequence
  Description of Artificial Sequence: Synthetic oligonucleotide
gccacgctgggtggctgaca

SEQ ID NO: 10740 - DNA, 20 bp, Artificial Sequence
  Description of Artificial Sequence: Synthetic oligonucleotide
ccacgctgggtggctgacaa

SEQ ID NO: 10741 - DNA, 20 bp, Artificial Sequence
  Description of Artificial Sequence: Synthetic oligonucleotide
cacgctgggtggctgacaaa

SEQ ID NO: 10742 - DNA, 20 bp, Artificial Sequence
  Description of Artificial Sequence: Synthetic oligonucleotide
acgctgggtggctgacaaag

SEQ ID NO: 10743 - DNA, 20 bp, Artificial Sequence
  Description of Artificial Sequence: Synthetic oligonucleotide
cgctgggtggctgacaaagg

SEQ ID NO: 10744 - DNA, 20 bp, Artificial Sequence
  Description of Artificial Sequence: Synthetic oligonucleotide
gctgggtggctgacaaaggc

SEQ ID NO: 10745 - DNA, 20 bp, Artificial Sequence
  Description of Artificial Sequence: Synthetic oligonucleotide
ctgggtggctgacaaaggcc

SEQ ID NO: 10746 - DNA, 20 bp, Artificial Sequence
  Description of Artificial Sequence: Synthetic oligonucleotide
tgggtggctgacaaaggcca

SEQ ID NO: 10747 - DNA, 20 bp, Artificial Sequence
  Description of Artificial Sequence: Synthetic oligonucleotide
gggtggctgacaaaggccac

SEQ ID NO: 10748 - DNA, 20 bp, Artificial Sequence
  Description of Artificial Sequence: Synthetic oligonucleotide
ggtggctgacaaaggccacg

SEQ ID NO: 10749 - DNA, 20 bp, Artificial Sequence
  Description of Artificial Sequence: Synthetic oligonucleotide
gtggctgacaaaggccacga

SEQ ID NO: 10750 - DNA, 20 bp, Artificial Sequence
  Description of Artificial Sequence: Synthetic oligonucleotide
tggctgacaaaggccacgat

SEQ ID NO: 10751 - DNA, 20 bp, Artificial Sequence
  Description of Artificial Sequence: Synthetic oligonucleotide
ggctgacaaaggccacgatg

SEQ ID NO: 10752 - DNA, 20 bp, Artificial Sequence
  Description of Artificial Sequence: Synthetic oligonucleotide
gctgacaaaggccacgatga

SEQ ID NO: 10753 - DNA, 20 bp, Artificial Sequence
  Description of Artificial Sequence: Synthetic oligonucleotide
ctgacaaaggccacgatgaa

SEQ ID NO: 10754 - DNA, 20 bp, Artificial Sequence
  Description of Artificial Sequence: Synthetic oligonucleotide
tgacaaaggccacgatgaaa

SEQ ID NO: 10755 - DNA, 20 bp, Artificial Sequence
  Description of Artificial Sequence: Synthetic oligonucleotide
gacaaaggccacgatgaaaa

SEQ ID NO: 10756 - DNA, 20 bp, Artificial Sequence
  Description of Artificial Sequence: Synthetic oligonucleotide
acaaaggccacgatgaaaat

SEQ ID NO: 10757 - DNA, 20 bp, Artificial Sequence
  Description of Artificial Sequence: Synthetic oligonucleotide
caaaggccacgatgaaaatg

SEQ ID NO: 10758 - DNA, 20 bp, Artificial Sequence
  Description of Artificial Sequence: Synthetic oligonucleotide
aaaggccacgatgaaaatgc

SEQ ID NO: 10759 - DNA, 20 bp, Artificial Sequence
  Description of Artificial Sequence: Synthetic oligonucleotide
aaggccacgatgaaaatgca

SEQ ID NO: 10760 - DNA, 20 bp, Artificial Sequence
  Description of Artificial Sequence: Synthetic oligonucleotide
aggccacgatgaaaatgcag

SEQ ID NO: 10761 - DNA, 20 bp, Artificial Sequence
  Description of Artificial Sequence: Synthetic oligonucleotide
ggccacgatgaaaatgcaga

SEQ ID NO: 10762 - DNA, 20 bp, Artificial Sequence
  Description of Artificial Sequence: Synthetic oligonucleotide
gccacgatgaaaatgcagag

SEQ ID NO: 10763 - DNA, 20 bp, Artificial Sequence
  Description of Artificial Sequence: Synthetic oligonucleotide
ccacgatgaaaatgcagagc

SEQ ID NO: 10764 - DNA, 20 bp, Artificial Sequence
  Description of Artificial Sequence: Synthetic oligonucleotide
cacgatgaaaatgcagagcc

SEQ ID NO: 10765 - DNA, 20 bp, Artificial Sequence
  Description of Artificial Sequence: Synthetic oligonucleotide
acgatgaaaatgcagagcca

SEQ ID NO: 10766 - DNA, 20 bp, Artificial Sequence
  Description of Artificial Sequence: Synthetic oligonucleotide
cgatgaaaatgcagagccag

SEQ ID NO: 10767 - DNA, 20 bp, Artificial Sequence
  Description of Artificial Sequence: Synthetic oligonucleotide
gatgaaaatgcagagccagg

SEQ ID NO: 10768 - DNA, 20 bp, Artificial Sequence
  Description of Artificial Sequence: Synthetic oligonucleotide
atgaaaatgcagagccaggt

SEQ ID NO: 10769 - DNA, 20 bp, Artificial Sequence
  Description of Artificial Sequence: Synthetic oligonucleotide
tgaaaatgcagagccaggtc

SEQ ID NO: 10770 - DNA, 20 bp, Artificial Sequence
  Description of Artificial Sequence: Synthetic oligonucleotide
gaaaatgcagagccaggtca

SEQ ID NO: 10771 - DNA, 20 bp, Artificial Sequence
  Description of Artificial Sequence: Synthetic oligonucleotide
aaaatgcagagccaggtcac

SEQ ID NO: 10772 - DNA, 20 bp, Artificial Sequence
  Description of Artificial Sequence: Synthetic oligonucleotide
aaatgcagagccaggtcaca

SEQ ID NO: 10773 - DNA, 20 bp, Artificial Sequence
  Description of Artificial Sequence: Synthetic oligonucleotide
aatgcagagccaggtcacag

SEQ ID NO: 10774 - DNA, 20 bp, Artificial Sequence
  Description of Artificial Sequence: Synthetic oligonucleotide
atgcagagccaggtcacagc

SEQ ID NO: 10775 - DNA, 20 bp, Artificial Sequence
  Description of Artificial Sequence: Synthetic oligonucleotide
tgcagagccaggtcacagct

SEQ ID NO: 10776 - DNA, 20 bp, Artificial Sequence
  Description of Artificial Sequence: Synthetic oligonucleotide
gcagagccaggtcacagctg

SEQ ID NO: 10777 - DNA, 20 bp, Artificial Sequence
  Description of Artificial Sequence: Synthetic oligonucleotide
cagagccaggtcacagctga

SEQ ID NO: 10778 - DNA, 20 bp, Artificial Sequence
  Description of Artificial Sequence: Synthetic oligonucleotide
agagccaggtcacagctgag

SEQ ID NO: 10779 - DNA, 20 bp, Artificial Sequence
  Description of Artificial Sequence: Synthetic oligonucleotide
gagccaggtcacagctgaga

SEQ ID NO: 10780 - DNA, 20 bp, Artificial Sequence
  Description of Artificial Sequence: Synthetic oligonucleotide
agccaggtcacagctgagag

SEQ ID NO: 10781 - DNA, 20 bp, Artificial Sequence
  Description of Artificial Sequence: Synthetic oligonucleotide
gccaggtcacagctgagaga

SEQ ID NO: 10782 - DNA, 20 bp, Artificial Sequence
  Description of Artificial Sequence: Synthetic oligonucleotide
ccaggtcacagctgagagag

SEQ ID NO: 10783 - DNA, 20 bp, Artificial Sequence
  Description of Artificial Sequence: Synthetic oligonucleotide
caggtcacagctgagagagg

SEQ ID NO: 10784 - DNA, 20 bp, Artificial Sequence
  Description of Artificial Sequence: Synthetic oligonucleotide
aggtcacagctgagagaggc

SEQ ID NO: 10785 - DNA, 20 bp, Artificial Sequence
  Description of Artificial Sequence: Synthetic oligonucleotide
ggtcacagctgagagaggct

SEQ ID NO: 10786 - DNA, 20 bp, Artificial Sequence
  Description of Artificial Sequence: Synthetic oligonucleotide
gtcacagctgagagaggctt

SEQ ID NO: 10787 - DNA, 20 bp, Artificial Sequence
  Description of Artificial Sequence: Synthetic oligonucleotide
tcacagctgagagaggcttt

SEQ ID NO: 10788 - DNA, 20 bp, Artificial Sequence
  Description of Artificial Sequence: Synthetic oligonucleotide
cacagctgagagaggctttt

SEQ ID NO: 10789 - DNA, 20 bp, Artificial Sequence
  Description of Artificial Sequence: Synthetic oligonucleotide
acagctgagagaggcttttt

SEQ ID NO: 10790 - DNA, 20 bp, Artificial Sequence
  Description of Artificial Sequence: Synthetic oligonucleotide
cagctgagagaggctttttc

SEQ ID NO: 10791 - DNA, 20 bp, Artificial Sequence
  Description of Artificial Sequence: Synthetic oligonucleotide
agctgagagaggctttttca

SEQ ID NO: 10792 - DNA, 20 bp, Artificial Sequence
  Description of Artificial Sequence: Synthetic oligonucleotide
gctgagagaggctttttcag

SEQ ID NO: 10793 - DNA, 20 bp, Artificial Sequence
  Description of Artificial Sequence: Synthetic oligonucleotide
ctgagagaggctttttcagc

SEQ ID NO: 10794 - DNA, 20 bp, Artificial Sequence
  Description of Artificial Sequence: Synthetic oligonucleotide
tgagagaggctttttcagca

SEQ ID NO: 10795 - DNA, 20 bp, Artificial Sequence
  Description of Artificial Sequence: Synthetic oligonucleotide
gagagaggctttttcagcat

SEQ ID NO: 10796 - DNA, 20 bp, Artificial Sequence
  Description of Artificial Sequence: Synthetic oligonucleotide
agagaggctttttcagcatc

SEQ ID NO: 10797 - DNA, 20 bp, Artificial Sequence
  Description of Artificial Sequence: Synthetic oligonucleotide
gagaggctttttcagcatct

SEQ ID NO: 10798 - DNA, 20 bp, Artificial Sequence
  Description of Artificial Sequence: Synthetic oligonucleotide
agaggctttttcagcatctt

SEQ ID NO: 10799 - DNA, 20 bp, Artificial Sequence
  Description of Artificial Sequence: Synthetic oligonucleotide
gaggctttttcagcatcttt

SEQ ID NO: 10800 - DNA, 20 bp, Artificial Sequence
  Description of Artificial Sequence: Synthetic oligonucleotide
aggctttttcagcatctttt

SEQ ID NO: 10801 - DNA, 20 bp, Artificial Sequence
  Description of Artificial Sequence: Synthetic oligonucleotide
ggctttttcagcatcttttg

SEQ ID NO: 10802 - DNA, 20 bp, Artificial Sequence
  Description of Artificial Sequence: Synthetic oligonucleotide
gctttttcagcatcttttgt

SEQ ID NO: 10803 - DNA, 20 bp, Artificial Sequence
  Description of Artificial Sequence: Synthetic oligonucleotide
ctttttcagcatcttttgtg

SEQ ID NO: 10804 - DNA, 20 bp, Artificial Sequence
  Description of Artificial Sequence: Synthetic oligonucleotide
tttttcagcatcttttgtgg

SEQ ID NO: 10805 - DNA, 20 bp, Artificial Sequence
  Description of Artificial Sequence: Synthetic oligonucleotide
ttttcagcatcttttgtggg

SEQ ID NO: 10806 - DNA, 20 bp, Artificial Sequence
  Description of Artificial Sequence: Synthetic oligonucleotide
tttcagcatcttttgtgggt

SEQ ID NO: 10807 - DNA, 20 bp, Artificial Sequence
  Description of Artificial Sequence: Synthetic oligonucleotide
ttcagcatcttttgtgggtt

SEQ ID NO: 10808 - DNA, 20 bp, Artificial Sequence
  Description of Artificial Sequence: Synthetic oligonucleotide
tcagcatcttttgtgggttt

SEQ ID NO: 10809 - DNA, 20 bp, Artificial Sequence
  Description of Artificial Sequence: Synthetic oligonucleotide
cagcatcttttgtgggtttg

SEQ ID NO: 10810 - DNA, 20 bp, Artificial Sequence
  Description of Artificial Sequence: Synthetic oligonucleotide
agcatcttttgtgggtttgg

SEQ ID NO: 10811 - DNA, 20 bp, Artificial Sequence
  Description of Artificial Sequence: Synthetic oligonucleotide
gcatcttttgtgggtttggg

SEQ ID NO: 10812 - DNA, 20 bp, Artificial Sequence
  Description of Artificial Sequence: Synthetic oligonucleotide
catcttttgtgggtttgggt

SEQ ID NO: 10813 - DNA, 20 bp, Artificial Sequence
  Description of Artificial Sequence: Synthetic oligonucleotide
atcttttgtgggtttgggtg

SEQ ID NO: 10814 - DNA, 20 bp, Artificial Sequence
  Description of Artificial Sequence: Synthetic oligonucleotide
tcttttgtgggtttgggtga

SEQ ID NO: 10815 - DNA, 20 bp, Artificial Sequence
  Description of Artificial Sequence: Synthetic oligonucleotide
cttttgtgggtttgggtgag

SEQ ID NO: 10816 - DNA, 20 bp, Artificial Sequence
  Description of Artificial Sequence: Synthetic oligonucleotide
ttttgtgggtttgggtgagg

SEQ ID NO: 10817 - DNA, 20 bp, Artificial Sequence
  Description of Artificial Sequence: Synthetic oligonucleotide
tttgtgggtttgggtgagga

SEQ ID NO: 10818 - DNA, 20 bp, Artificial Sequence
  Description of Artificial Sequence: Synthetic oligonucleotide
ttgtgggtttgggtgaggaa

SEQ ID NO: 10819 - DNA, 20 bp, Artificial Sequence
  Description of Artificial Sequence: Synthetic oligonucleotide
tgtgggtttgggtgaggaag

SEQ ID NO: 10820 - DNA, 20 bp, Artificial Sequence
  Description of Artificial Sequence: Synthetic oligonucleotide
gtgggtttgggtgaggaagg

SEQ ID NO: 10821 - DNA, 20 bp, Artificial Sequence
  Description of Artificial Sequence: Synthetic oligonucleotide
tgggtttgggtgaggaaggc

SEQ ID NO: 10822 - DNA, 20 bp, Artificial Sequence
  Description of Artificial Sequence: Synthetic oligonucleotide
gggtttgggtgaggaaggct

SEQ ID NO: 10823 - DNA, 20 bp, Artificial Sequence
  Description of Artificial Sequence: Synthetic oligonucleotide
ggtttgggtgaggaaggctc

SEQ ID NO: 10824 - DNA, 20 bp, Artificial Sequence
  Description of Artificial Sequence: Synthetic oligonucleotide
gtttgggtgaggaaggctct

SEQ ID NO: 10825 - DNA, 20 bp, Artificial Sequence
  Description of Artificial Sequence: Synthetic oligonucleotide
tttgggtgaggaaggctctt

SEQ ID NO: 10826 - DNA, 20 bp, Artificial Sequence
  Description of Artificial Sequence: Synthetic oligonucleotide
ttgggtgaggaaggctcttc

SEQ ID NO: 10827 - DNA, 20 bp, Artificial Sequence
  Description of Artificial Sequence: Synthetic oligonucleotide
tgggtgaggaaggctcttcc

SEQ ID NO: 10828 - DNA, 20 bp, Artificial Sequence
  Description of Artificial Sequence: Synthetic oligonucleotide
gggtgaggaaggctcttcct

SEQ ID NO: 10829 - DNA, 20 bp, Artificial Sequence
  Description of Artificial Sequence: Synthetic oligonucleotide
ggtgaggaaggctcttcctt

SEQ ID NO: 10830 - DNA, 20 bp, Artificial Sequence
  Description of Artificial Sequence: Synthetic oligonucleotide
gtgaggaaggctcttccttc

SEQ ID NO: 10831 - DNA, 20 bp, Artificial Sequence
  Description of Artificial Sequence: Synthetic oligonucleotide
tgaggaaggctcttccttca

SEQ ID NO: 10832 - DNA, 20 bp, Artificial Sequence
  Description of Artificial Sequence: Synthetic oligonucleotide
gaggaaggctcttccttcag

SEQ ID NO: 10833 - DNA, 20 bp, Artificial Sequence
  Description of Artificial Sequence: Synthetic oligonucleotide
aggaaggctcttccttcagg

SEQ ID NO: 10834 - DNA, 20 bp, Artificial Sequence
  Description of Artificial Sequence: Synthetic oligonucleotide
ggaaggctcttccttcaggg

SEQ ID NO: 10835 - DNA, 20 bp, Artificial Sequence
  Description of Artificial Sequence: Synthetic oligonucleotide
gaaggctcttccttcagggg

SEQ ID NO: 10836 - DNA, 20 bp, Artificial Sequence
  Description of Artificial Sequence: Synthetic oligonucleotide
aaggctcttccttcagggga

SEQ ID NO: 10837 - DNA, 20 bp, Artificial Sequence
  Description of Artificial Sequence: Synthetic oligonucleotide
aggctcttccttcaggggag

SEQ ID NO: 10838 - DNA, 20 bp, Artificial Sequence
  Description of Artificial Sequence: Synthetic oligonucleotide
ggctcttccttcaggggagt

SEQ ID NO: 10839 - DNA, 20 bp, Artificial Sequence
  Description of Artificial Sequence: Synthetic oligonucleotide
gctcttccttcaggggagtc

SEQ ID NO: 10840 - DNA, 20 bp, Artificial Sequence
  Description of Artificial Sequence: Synthetic oligonucleotide
ctcttccttcaggggagtct

SEQ ID NO: 10841 - DNA, 20 bp, Artificial Sequence
  Description of Artificial Sequence: Synthetic oligonucleotide
tcttccttcaggggagtctg

SEQ ID NO: 10842 - DNA, 20 bp, Artificial Sequence
  Description of Artificial Sequence: Synthetic oligonucleotide
cttccttcaggggagtctgg

SEQ ID NO: 10843 - DNA, 20 bp, Artificial Sequence
  Description of Artificial Sequence: Synthetic oligonucleotide
ttccttcaggggagtctgga

SEQ ID NO: 10844 - DNA, 20 bp, Artificial Sequence
  Description of Artificial Sequence: Synthetic oligonucleotide
tccttcaggggagtctggag

SEQ ID NO: 10845 - DNA, 20 bp, Artificial Sequence
  Description of Artificial Sequence: Synthetic oligonucleotide
ccttcaggggagtctggaga

SEQ ID NO: 10846 - DNA, 20 bp, Artificial Sequence
  Description of Artificial Sequence: Synthetic oligonucleotide
cttcaggggagtctggagat

SEQ ID NO: 10847 - DNA, 20 bp, Artificial Sequence
  Description of Artificial Sequence: Synthetic oligonucleotide
ttcaggggagtctggagatg

SEQ ID NO: 10848 - DNA, 20 bp, Artificial Sequence
  Description of Artificial Sequence: Synthetic oligonucleotide
tcaggggagtctggagatgc

SEQ ID NO: 10849 - DNA, 20 bp, Artificial Sequence
  Description of Artificial Sequence: Synthetic oligonucleotide
caggggagtctggagatgcc

SEQ ID NO: 10850 - DNA, 20 bp, Artificial Sequence
  Description of Artificial Sequence: Synthetic oligonucleotide
aggggagtctggagatgccc

SEQ ID NO: 10851 - DNA, 20 bp, Artificial Sequence
  Description of Artificial Sequence: Synthetic oligonucleotide
ggggagtctggagatgccca

SEQ ID NO: 10852 - DNA, 20 bp, Artificial Sequence
  Description of Artificial Sequence: Synthetic oligonucleotide
gggagtctggagatgcccag

SEQ ID NO: 10853 - DNA, 20 bp, Artificial Sequence
  Description of Artificial Sequence: Synthetic oligonucleotide
ggagtctggagatgcccagc

SEQ ID NO: 10854 - DNA, 20 bp, Artificial Sequence
  Description of Artificial Sequence: Synthetic oligonucleotide
gagtctggagatgcccagct

SEQ ID NO: 10855 - DNA, 20 bp, Artificial Sequence
  Description of Artificial Sequence: Synthetic oligonucleotide
agtctggagatgcccagctg

SEQ ID NO: 10856 - DNA, 20 bp, Artificial Sequence
  Description of Artificial Sequence: Synthetic oligonucleotide
gtctggagatgcccagctga

SEQ ID NO: 10857 - DNA, 20 bp, Artificial Sequence
  Description of Artificial Sequence: Synthetic oligonucleotide
tctggagatgcccagctgag

SEQ ID NO: 10858 - DNA, 20 bp, Artificial Sequence
  Description of Artificial Sequence: Synthetic oligonucleotide
ctggagatgcccagctgagg

SEQ ID NO: 10859 - DNA, 20 bp, Artificial Sequence
  Description of Artificial Sequence: Synthetic oligonucleotide
tggagatgcccagctgaggt

SEQ ID NO: 10860 - DNA, 20 bp, Artificial Sequence
  Description of Artificial Sequence: Synthetic oligonucleotide
ggagatgcccagctgaggtc

SEQ ID NO: 10861 - DNA, 20 bp, Artificial Sequence
  Description of Artificial Sequence: Synthetic oligonucleotide
gagatgcccagctgaggtct

SEQ ID NO: 10862 - DNA, 20 bp, Artificial Sequence
  Description of Artificial Sequence: Synthetic oligonucleotide
agatgcccagctgaggtctg

SEQ ID NO: 10863 - DNA, 20 bp, Artificial Sequence
  Description of Artificial Sequence: Synthetic oligonucleotide
gatgcccagctgaggtctgc

SEQ ID NO: 10864 - DNA, 20 bp, Artificial Sequence
  Description of Artificial Sequence: Synthetic oligonucleotide
atgcccagctgaggtctgca

SEQ ID NO: 10865 - DNA, 20 bp, Artificial Sequence
  Description of Artificial Sequence: Synthetic oligonucleotide
tgcccagctgaggtctgcaa

SEQ ID NO: 10866 - DNA, 20 bp, Artificial Sequence
  Description of Artificial Sequence: Synthetic oligonucleotide
gcccagctgaggtctgcaaa

SEQ ID NO: 10867 - DNA, 20 bp, Artificial Sequence
  Description of Artificial Sequence: Synthetic oligonucleotide
cccagctgaggtctgcaaag

SEQ ID NO: 10868 - DNA, 20 bp, Artificial Sequence
  Description of Artificial Sequence: Synthetic oligonucleotide
ccagctgaggtctgcaaagc

SEQ ID NO: 10869 - DNA, 20 bp, Artificial Sequence
  Description of Artificial Sequence: Synthetic oligonucleotide
cagctgaggtctgcaaagct

SEQ ID NO: 10870 - DNA, 20 bp, Artificial Sequence
  Description of Artificial Sequence: Synthetic oligonucleotide
agctgaggtctgcaaagctg

SEQ ID NO: 10871 - DNA, 20 bp, Artificial Sequence
  Description of Artificial Sequence: Synthetic oligonucleotide
gctgaggtctgcaaagctgc

SEQ ID NO: 10872 - DNA, 20 bp, Artificial Sequence
  Description of Artificial Sequence: Synthetic oligonucleotide
ctgaggtctgcaaagctgca

SEQ ID NO: 10873 - DNA, 20 bp, Artificial Sequence
  Description of Artificial Sequence: Synthetic oligonucleotide
tgaggtctgcaaagctgcag

SEQ ID NO: 10874 - DNA, 20 bp, Artificial Sequence
  Description of Artificial Sequence: Synthetic oligonucleotide
gaggtctgcaaagctgcagc

SEQ ID NO: 10875 - DNA, 20 bp, Artificial Sequence
  Description of Artificial Sequence: Synthetic oligonucleotide
aggtctgcaaagctgcagca

SEQ ID NO: 10876 - DNA, 20 bp, Artificial Sequence
  Description of Artificial Sequence: Synthetic oligonucleotide
ggtctgcaaagctgcagcag

SEQ ID NO: 10877 - DNA, 20 bp, Artificial Sequence
  Description of Artificial Sequence: Synthetic oligonucleotide
gtctgcaaagctgcagcagg

SEQ ID NO: 10878 - DNA, 20 bp, Artificial Sequence
  Description of Artificial Sequence: Synthetic oligonucleotide
tctgcaaagctgcagcaggc

SEQ ID NO: 10879 - DNA, 20 bp, Artificial Sequence
  Description of Artificial Sequence: Synthetic oligonucleotide
ctgcaaagctgcagcaggct

SEQ ID NO: 10880 - DNA, 20 bp, Artificial Sequence
  Description of Artificial Sequence: Synthetic oligonucleotide
tgcaaagctgcagcaggctg

SEQ ID NO: 10881 - DNA, 20 bp, Artificial Sequence
  Description of Artificial Sequence: Synthetic oligonucleotide
gcaaagctgcagcaggctga

SEQ ID NO: 10882 - DNA, 20 bp, Artificial Sequence
  Description of Artificial Sequence: Synthetic oligonucleotide
caaagctgcagcaggctgac

SEQ ID NO: 10883 - DNA, 20 bp, Artificial Sequence
  Description of Artificial Sequence: Synthetic oligonucleotide
aaagctgcagcaggctgact

SEQ ID NO: 10884 - DNA, 20 bp, Artificial Sequence
  Description of Artificial Sequence: Synthetic oligonucleotide
aagctgcagcaggctgactg

SEQ ID NO: 10885 - DNA, 20 bp, Artificial Sequence
  Description of Artificial Sequence: Synthetic oligonucleotide
agctgcagcaggctgactga

SEQ ID NO: 10886 - DNA, 20 bp, Artificial Sequence
  Description of Artificial Sequence: Synthetic oligonucleotide
gctgcagcaggctgactgaa

SEQ ID NO: 10887 - DNA, 20 bp, Artificial Sequence
  Description of Artificial Sequence: Synthetic oligonucleotide
ctgcagcaggctgactgaac

SEQ ID NO: 10888 - DNA, 20 bp, Artificial Sequence
  Description of Artificial Sequence: Synthetic oligonucleotide
tgcagcaggctgactgaacc

SEQ ID NO: 10889 - DNA, 20 bp, Artificial Sequence
  Description of Artificial Sequence: Synthetic oligonucleotide
gcagcaggctgactgaacct

SEQ ID NO: 10890 - DNA, 20 bp, Artificial Sequence
  Description of Artificial Sequence: Synthetic oligonucleotide
cagcaggctgactgaacctt

SEQ ID NO: 10891 - DNA, 20 bp, Artificial Sequence
  Description of Artificial Sequence: Synthetic oligonucleotide
agcaggctgactgaacctta

SEQ ID NO: 10892 - DNA, 20 bp, Artificial Sequence
  Description of Artificial Sequence: Synthetic oligonucleotide
gcaggctgactgaaccttac

SEQ ID NO: 10893 - DNA, 20 bp, Artificial Sequence
  Description of Artificial Sequence: Synthetic oligonucleotide
caggctgactgaaccttacg

SEQ ID NO: 10894 - DNA, 20 bp, Artificial Sequence
  Description of Artificial Sequence: Synthetic oligonucleotide
aggctgactgaaccttacgc

SEQ ID NO: 10895 - DNA, 20 bp, Artificial Sequence
  Description of Artificial Sequence: Synthetic oligonucleotide
ggctgactgaaccttacgct

SEQ ID NO: 10896 - DNA, 20 bp, Artificial Sequence
  Description of Artificial Sequence: Synthetic oligonucleotide
gctgactgaaccttacgctt

SEQ ID NO: 10897 - DNA, 20 bp, Artificial Sequence
  Description of Artificial Sequence: Synthetic oligonucleotide
ctgactgaaccttacgcttt

SEQ ID NO: 10898 - DNA, 20 bp, Artificial Sequence
  Description of Artificial Sequence: Synthetic oligonucleotide
tgactgaaccttacgctttc

SEQ ID NO: 10899 - DNA, 20 bp, Artificial Sequence
  Description of Artificial Sequence: Synthetic oligonucleotide
gactgaaccttacgctttca

SEQ ID NO: 10900 - DNA, 20 bp, Artificial Sequence
  Description of Artificial Sequence: Synthetic oligonucleotide
actgaaccttacgctttcac

SEQ ID NO: 10901 - DNA, 20 bp, Artificial Sequence
  Description of Artificial Sequence: Synthetic oligonucleotide
ctgaaccttacgctttcact

SEQ ID NO: 10902 - DNA, 20 bp, Artificial Sequence
  Description of Artificial Sequence: Synthetic oligonucleotide
tgaaccttacgctttcactc

SEQ ID NO: 10903 - DNA, 20 bp, Artificial Sequence
  Description of Artificial Sequence: Synthetic oligonucleotide
gaaccttacgctttcactct

SEQ ID NO: 10904 - DNA, 20 bp, Artificial Sequence
  Description of Artificial Sequence: Synthetic oligonucleotide
aaccttacgctttcactctg

SEQ ID NO: 10905 - DNA, 20 bp, Artificial Sequence
  Description of Artificial Sequence: Synthetic oligonucleotide
accttacgctttcactctga

SEQ ID NO: 10906 - DNA, 20 bp, Artificial Sequence
  Description of Artificial Sequence: Synthetic oligonucleotide
ccttacgctttcactctgag

SEQ ID NO: 10907 - DNA, 20 bp, Artificial Sequence
  Description of Artificial Sequence: Synthetic oligonucleotide
cttacgctttcactctgagg

SEQ ID NO: 10908 - DNA, 20 bp, Artificial Sequence
  Description of Artificial Sequence: Synthetic oligonucleotide
ttacgctttcactctgaggg

SEQ ID NO: 10909 - DNA, 20 bp, Artificial Sequence
  Description of Artificial Sequence: Synthetic oligonucleotide
tacgctttcactctgagggc

SEQ ID NO: 10910 - DNA, 20 bp, Artificial Sequence
  Description of Artificial Sequence: Synthetic oligonucleotide
acgctttcactctgagggcc

SEQ ID NO: 10911 - DNA, 20 bp, Artificial Sequence
  Description of Artificial Sequence: Synthetic oligonucleotide
cgctttcactctgagggcct

SEQ ID NO: 10912 - DNA, 20 bp, Artificial Sequence
  Description of Artificial Sequence: Synthetic oligonucleotide
gctttcactctgagggcctc

SEQ ID NO: 10913 - DNA, 20 bp, Artificial Sequence
  Description of Artificial Sequence: Synthetic oligonucleotide
ctttcactctgagggcctcg

SEQ ID NO: 10914 - DNA, 20 bp, Artificial Sequence
  Description of Artificial Sequence: Synthetic oligonucleotide
tttcactctgagggcctcgc

SEQ ID NO: 10915 - DNA, 20 bp, Artificial Sequence
  Description of Artificial Sequence: Synthetic oligonucleotide
ttcactctgagggcctcgcc

SEQ ID NO: 10916 - DNA, 20 bp, Artificial Sequence
  Description of Artificial Sequence: Synthetic oligonucleotide
tcactctgagggcctcgcca

SEQ ID NO: 10917 - DNA, 20 bp, Artificial Sequence
  Description of Artificial Sequence: Synthetic oligonucleotide
cactctgagggcctcgccac

SEQ ID NO: 10918 - DNA, 20 bp, Artificial Sequence
  Description of Artificial Sequence: Synthetic oligonucleotide
actctgagggcctcgccact

SEQ ID NO: 10919 - DNA, 20 bp, Artificial Sequence
  Description of Artificial Sequence: Synthetic oligonucleotide
ctctgagggcctcgccactt

SEQ ID NO: 10920 - DNA, 20 bp, Artificial Sequence
  Description of Artificial Sequence: Synthetic oligonucleotide
tctgagggcctcgccacttt

SEQ ID NO: 10921 - DNA, 20 bp, Artificial Sequence
  Description of Artificial Sequence: Synthetic oligonucleotide
ctgagggcctcgccactttg

SEQ ID NO: 10922 - DNA, 20 bp, Artificial Sequence
  Description of Artificial Sequence: Synthetic oligonucleotide
tgagggcctcgccactttgt

SEQ ID NO: 10923 - DNA, 20 bp, Artificial Sequence
  Description of Artificial Sequence: Synthetic oligonucleotide
gagggcctcgccactttgtt

SEQ ID NO: 10924 - DNA, 20 bp, Artificial Sequence
  Description of Artificial Sequence: Synthetic oligonucleotide
agggcctcgccactttgttg

SEQ ID NO: 10925 - DNA, 20 bp, Artificial Sequence
  Description of Artificial Sequence: Synthetic oligonucleotide
gggcctcgccactttgttgt

SEQ ID NO: 10926 - DNA, 20 bp, Artificial Sequence
  Description of Artificial Sequence: Synthetic oligonucleotide
ggcctcgccactttgttgtt

SEQ ID NO: 10927 - DNA, 20 bp, Artificial Sequence
  Description of Artificial Sequence: Synthetic oligonucleotide
gcctcgccactttgttgttt

SEQ ID NO: 10928 - DNA, 20 bp, Artificial Sequence
  Description of Artificial Sequence: Synthetic oligonucleotide
cctcgccactttgttgtttt

SEQ ID NO: 10929 - DNA, 20 bp, Artificial Sequence
  Description of Artificial Sequence: Synthetic oligonucleotide
ctcgccactttgttgttttc

SEQ ID NO: 10930 - DNA, 20 bp, Artificial Sequence
  Description of Artificial Sequence: Synthetic oligonucleotide
tcgccactttgttgttttct

SEQ ID NO: 10931 - DNA, 20 bp, Artificial Sequence
  Description of Artificial Sequence: Synthetic oligonucleotide
cgccactttgttgttttctc

SEQ ID NO: 10932 - DNA, 20 bp, Artificial Sequence
  Description of Artificial Sequence: Synthetic oligonucleotide
gccactttgttgttttctct

SEQ ID NO: 10933 - DNA, 20 bp, Artificial Sequence
  Description of Artificial Sequence: Synthetic oligonucleotide
ccactttgttgttttctctc

SEQ ID NO: 10934 - DNA, 20 bp, Artificial Sequence
  Description of Artificial Sequence: Synthetic oligonucleotide
cactttgttgttttctctct

SEQ ID NO: 10935 - DNA, 20 bp, Artificial Sequence
  Description of Artificial Sequence: Synthetic oligonucleotide
actttgttgttttctctctt

SEQ ID NO: 10936 - DNA, 20 bp, Artificial Sequence
  Description of Artificial Sequence: Synthetic oligonucleotide
ctttgttgttttctctcttt

SEQ ID NO: 10937 - DNA, 20 bp, Artificial Sequence
  Description of Artificial Sequence: Synthetic oligonucleotide
tttgttgttttctctctttc

SEQ ID NO: 10938 - DNA, 20 bp, Artificial Sequence
  Description of Artificial Sequence: Synthetic oligonucleotide
ttgttgttttctctctttcc

SEQ ID NO: 10939 - DNA, 20 bp, Artificial Sequence
  Description of Artificial Sequence: Synthetic oligonucleotide
tgttgttttctctctttcct

SEQ ID NO: 10940 - DNA, 20 bp, Artificial Sequence
  Description of Artificial Sequence: Synthetic oligonucleotide
gttgttttctctctttcctt

SEQ ID NO: 10941 - DNA, 20 bp, Artificial Sequence
  Description of Artificial Sequence: Synthetic oligonucleotide
ttgttttctctctttccttg

SEQ ID NO: 10942 - DNA, 20 bp, Artificial Sequence
  Description of Artificial Sequence: Synthetic oligonucleotide
tgttttctctctttccttgc

SEQ ID NO: 10943 - DNA, 20 bp, Artificial Sequence
  Description of Artificial Sequence: Synthetic oligonucleotide
gttttctctctttccttgct

SEQ ID NO: 10944 - DNA, 20 bp, Artificial Sequence
  Description of Artificial Sequence: Synthetic oligonucleotide
ttttctctctttccttgctc

SEQ ID NO: 10945 - DNA, 20 bp, Artificial Sequence
  Description of Artificial Sequence: Synthetic oligonucleotide
tttctctctttccttgctct

SEQ ID NO: 10946 - DNA, 20 bp, Artificial Sequence
  Description of Artificial Sequence: Synthetic oligonucleotide
ttctctctttccttgctctt

SEQ ID NO: 10947 - DNA, 20 bp, Artificial Sequence
  Description of Artificial Sequence: Synthetic oligonucleotide
tctctctttccttgctcttt

SEQ ID NO: 10948 - DNA, 20 bp, Artificial Sequence
  Description of Artificial Sequence: Synthetic oligonucleotide
ctctctttccttgctctttg

SEQ ID NO: 10949 - DNA, 20 bp, Artificial Sequence
  Description of Artificial Sequence: Synthetic oligonucleotide
tctctttccttgctctttgc

SEQ ID NO: 10950 - DNA, 20 bp, Artificial Sequence
  Description of Artificial Sequence: Synthetic oligonucleotide
ctctttccttgctctttgct

SEQ ID NO: 10951 - DNA, 20 bp, Artificial Sequence
  Description of Artificial Sequence: Synthetic oligonucleotide
tctttccttgctctttgcta

SEQ ID NO: 10952 - DNA, 20 bp, Artificial Sequence
  Description of Artificial Sequence: Synthetic oligonucleotide
ctttccttgctctttgctag

SEQ ID NO: 10953 - DNA, 20 bp, Artificial Sequence
  Description of Artificial Sequence: Synthetic oligonucleotide
tttccttgctctttgctagc

SEQ ID NO: 10954 - DNA, 20 bp, Artificial Sequence
  Description of Artificial Sequence: Synthetic oligonucleotide
ttccttgctctttgctagcc

SEQ ID NO: 10955 - DNA, 20 bp, Artificial Sequence
  Description of Artificial Sequence: Synthetic oligonucleotide
tccttgctctttgctagcct

SEQ ID NO: 10956 - DNA, 20 bp, Artificial Sequence
  Description of Artificial Sequence: Synthetic oligonucleotide
ccttgctctttgctagcctt

SEQ ID NO: 10957 - DNA, 20 bp, Artificial Sequence
  Description of Artificial Sequence: Synthetic oligonucleotide
cttgctctttgctagccttt

SEQ ID NO: 10958 - DNA, 20 bp, Artificial Sequence
  Description of Artificial Sequence: Synthetic oligonucleotide
ttgctctttgctagcctttc

SEQ ID NO: 10959 - DNA, 20 bp, Artificial Sequence
  Description of Artificial Sequence: Synthetic oligonucleotide
tgctctttgctagcctttct

SEQ ID NO: 10960 - DNA, 20 bp, Artificial Sequence
  Description of Artificial Sequence: Synthetic oligonucleotide
gctctttgctagcctttctc

SEQ ID NO: 10961 - DNA, 20 bp, Artificial Sequence
  Description of Artificial Sequence: Synthetic oligonucleotide
ctctttgctagcctttctca

SEQ ID NO: 10962 - DNA, 20 bp, Artificial Sequence
  Description of Artificial Sequence: Synthetic oligonucleotide
tctttgctagcctttctcaa

SEQ ID NO: 10963 - DNA, 20 bp, Artificial Sequence
  Description of Artificial Sequence: Synthetic oligonucleotide
ctttgctagcctttctcaaa

SEQ ID NO: 10964 - DNA, 20 bp, Artificial Sequence
  Description of Artificial Sequence: Synthetic oligonucleotide
tttgctagcctttctcaaag

SEQ ID NO: 10965 - DNA, 20 bp, Artificial Sequence
  Description of Artificial Sequence: Synthetic oligonucleotide
ttgctagcctttctcaaagc

SEQ ID NO: 10966 - DNA, 20 bp, Artificial Sequence
  Description of Artificial Sequence: Synthetic oligonucleotide
tgctagcctttctcaaagct

SEQ ID NO: 10967 - DNA, 20 bp, Artificial Sequence
  Description of Artificial Sequence: Synthetic oligonucleotide
gctagcctttctcaaagctt

SEQ ID NO: 10968 - DNA, 20 bp, Artificial Sequence
  Description of Artificial Sequence: Synthetic oligonucleotide
ctagcctttctcaaagcttg

SEQ ID NO: 10969 - DNA, 20 bp, Artificial Sequence
  Description of Artificial Sequence: Synthetic oligonucleotide
tagcctttctcaaagcttga

SEQ ID NO: 10970 - DNA, 20 bp, Artificial Sequence
  Description of Artificial Sequence: Synthetic oligonucleotide
agcctttctcaaagcttgag

SEQ ID NO: 10971 - DNA, 20 bp, Artificial Sequence
  Description of Artificial Sequence: Synthetic oligonucleotide
gcctttctcaaagcttgagt

SEQ ID NO: 10972 - DNA, 20 bp, Artificial Sequence
  Description of Artificial Sequence: Synthetic oligonucleotide
cctttctcaaagcttgagtc

SEQ ID NO: 10973 - DNA, 20 bp, Artificial Sequence
  Description of Artificial Sequence: Synthetic oligonucleotide
ctttctcaaagcttgagtct

SEQ ID NO: 10974 - DNA, 20 bp, Artificial Sequence
  Description of Artificial Sequence: Synthetic oligonucleotide
tttctcaaagcttgagtctc

SEQ ID NO: 10975 - DNA, 20 bp, Artificial Sequence
  Description of Artificial Sequence: Synthetic oligonucleotide
ttctcaaagcttgagtctct

SEQ ID NO: 10976 - DNA, 20 bp, Artificial Sequence
  Description of Artificial Sequence: Synthetic oligonucleotide
tctcaaagcttgagtctctg

SEQ ID NO: 10977 - DNA, 20 bp, Artificial Sequence
  Description of Artificial Sequence: Synthetic oligonucleotide
ctcaaagcttgagtctctga

SEQ ID NO: 10978 - DNA, 20 bp, Artificial Sequence
  Description of Artificial Sequence: Synthetic oligonucleotide
tcaaagcttgagtctctgac

SEQ ID NO: 10979 - DNA, 20 bp, Artificial Sequence
  Description of Artificial Sequence: Synthetic oligonucleotide
caaagcttgagtctctgaca

SEQ ID NO: 10980 - DNA, 20 bp, Artificial Sequence
  Description of Artificial Sequence: Synthetic oligonucleotide
aaagcttgagtctctgacag

SEQ ID NO: 10981 - DNA, 20 bp, Artificial Sequence
  Description of Artificial Sequence: Synthetic oligonucleotide
aagcttgagtctctgacagg

SEQ ID NO: 10982 - DNA, 20 bp, Artificial Sequence
  Description of Artificial Sequence: Synthetic oligonucleotide
agcttgagtctctgacaggg

SEQ ID NO: 10983 - DNA, 20 bp, Artificial Sequence
  Description of Artificial Sequence: Synthetic oligonucleotide
gcttgagtctctgacagggg

SEQ ID NO: 10984 - DNA, 20 bp, Artificial Sequence
  Description of Artificial Sequence: Synthetic oligonucleotide
cttgagtctctgacagggga

SEQ ID NO: 10985 - DNA, 20 bp, Artificial Sequence
  Description of Artificial Sequence: Synthetic oligonucleotide
ttgagtctctgacaggggag

SEQ ID NO: 10986 - DNA, 20 bp, Artificial Sequence
  Description of Artificial Sequence: Synthetic oligonucleotide
tgagtctctgacaggggagc

SEQ ID NO: 10987 - DNA, 20 bp, Artificial Sequence
  Description of Artificial Sequence: Synthetic oligonucleotide
gagtctctgacaggggagct

SEQ ID NO: 10988 - DNA, 20 bp, Artificial Sequence
  Description of Artificial Sequence: Synthetic oligonucleotide
agtctctgacaggggagctg

SEQ ID NO: 10989 - DNA, 20 bp, Artificial Sequence
  Description of Artificial Sequence: Synthetic oligonucleotide
gtctctgacaggggagctga

SEQ ID NO: 10990 - DNA, 20 bp, Artificial Sequence
  Description of Artificial Sequence: Synthetic oligonucleotide
tctctgacaggggagctgaa

SEQ ID NO: 10991 - DNA, 20 bp, Artificial Sequence
  Description of Artificial Sequence: Synthetic oligonucleotide
ctctgacaggggagctgaat

SEQ ID NO: 10992 - DNA, 20 bp, Artificial Sequence
  Description of Artificial Sequence: Synthetic oligonucleotide
tctgacaggggagctgaatg

SEQ ID NO: 10993 - DNA, 20 bp, Artificial Sequence
  Description of Artificial Sequence: Synthetic oligonucleotide
ctgacaggggagctgaatgg

SEQ ID NO: 10994 - DNA, 20 bp, Artificial Sequence
  Description of Artificial Sequence: Synthetic oligonucleotide
tgacaggggagctgaatggg

SEQ ID NO: 10995 - DNA, 20 bp, Artificial Sequence
  Description of Artificial Sequence: Synthetic oligonucleotide
gacaggggagctgaatgggt

SEQ ID NO: 10996 - DNA, 20 bp, Artificial Sequence
  Description of Artificial Sequence: Synthetic oligonucleotide
acaggggagctgaatgggta

SEQ ID NO: 10997 - DNA, 20 bp, Artificial Sequence
  Description of Artificial Sequence: Synthetic oligonucleotide
caggggagctgaatgggtag

SEQ ID NO: 10998 - DNA, 20 bp, Artificial Sequence
  Description of Artificial Sequence: Synthetic oligonucleotide
aggggagctgaatgggtagc

SEQ ID NO: 10999 - DNA, 20 bp, Artificial Sequence
  Description of Artificial Sequence: Synthetic oligonucleotide
ggggagctgaatgggtagcc

SEQ ID NO: 11000 - DNA, 20 bp, Artificial Sequence
  Description of Artificial Sequence: Synthetic oligonucleotide
gggagctgaatgggtagcct

SEQ ID NO: 11001 - DNA, 20 bp, Artificial Sequence
  Description of Artificial Sequence: Synthetic oligonucleotide
ggagctgaatgggtagccta

SEQ ID NO: 11002 - DNA, 20 bp, Artificial Sequence
  Description of Artificial Sequence: Synthetic oligonucleotide
gagctgaatgggtagcctat

SEQ ID NO: 11003 - DNA, 20 bp, Artificial Sequence
  Description of Artificial Sequence: Synthetic oligonucleotide
agctgaatgggtagcctata

SEQ ID NO: 11004 - DNA, 20 bp, Artificial Sequence
  Description of Artificial Sequence: Synthetic oligonucleotide
gctgaatgggtagcctatag

SEQ ID NO: 11005 - DNA, 20 bp, Artificial Sequence
  Description of Artificial Sequence: Synthetic oligonucleotide
ctgaatgggtagcctatagc

SEQ ID NO: 11006 - DNA, 20 bp, Artificial Sequence
  Description of Artificial Sequence: Synthetic oligonucleotide
tgaatgggtagcctatagct

SEQ ID NO: 11007 - DNA, 20 bp, Artificial Sequence
  Description of Artificial Sequence: Synthetic oligonucleotide
gaatgggtagcctatagctt

SEQ ID NO: 11008 - DNA, 20 bp, Artificial Sequence
  Description of Artificial Sequence: Synthetic oligonucleotide
aatgggtagcctatagcttt

SEQ ID NO: 11009 - DNA, 20 bp, Artificial Sequence
  Description of Artificial Sequence: Synthetic oligonucleotide
atgggtagcctatagctttc

SEQ ID NO: 11010 - DNA, 20 bp, Artificial Sequence
  Description of Artificial Sequence: Synthetic oligonucleotide
tgggtagcctatagctttcc

SEQ ID NO: 11011 - DNA, 20 bp, Artificial Sequence
  Description of Artificial Sequence: Synthetic oligonucleotide
gggtagcctatagctttcct

SEQ ID NO: 11012 - DNA, 20 bp, Artificial Sequence
  Description of Artificial Sequence: Synthetic oligonucleotide
ggtagcctatagctttcctt

SEQ ID NO: 11013 - DNA, 20 bp, Artificial Sequence
  Description of Artificial Sequence: Synthetic oligonucleotide
gtagcctatagctttccttc

SEQ ID NO: 11014 - DNA, 20 bp, Artificial Sequence
  Description of Artificial Sequence: Synthetic oligonucleotide
tagcctatagctttccttcc

SEQ ID NO: 11015 - DNA, 20 bp, Artificial Sequence
  Description of Artificial Sequence: Synthetic oligonucleotide
agcctatagctttccttcca

SEQ ID NO: 11016 - DNA, 20 bp, Artificial Sequence
  Description of Artificial Sequence: Synthetic oligonucleotide
gcctatagctttccttccaa

SEQ ID NO: 11017 - DNA, 20 bp, Artificial Sequence
  Description of Artificial Sequence: Synthetic oligonucleotide
cctatagctttccttccaag

SEQ ID NO: 11018 - DNA, 20 bp, Artificial Sequence
  Description of Artificial Sequence: Synthetic oligonucleotide
ctatagctttccttccaagc

SEQ ID NO: 11019 - DNA, 20 bp, Artificial Sequence
  Description of Artificial Sequence: Synthetic oligonucleotide
tatagctttccttccaagcc

SEQ ID NO: 11020 - DNA, 20 bp, Artificial Sequence
  Description of Artificial Sequence: Synthetic oligonucleotide
atagctttccttccaagccc

SEQ ID NO: 11021 - DNA, 20 bp, Artificial Sequence
  Description of Artificial Sequence: Synthetic oligonucleotide
tagctttccttccaagcccg

SEQ ID NO: 11022 - DNA, 20 bp, Artificial Sequence
  Description of Artificial Sequence: Synthetic oligonucleotide
agctttccttccaagcccga

SEQ ID NO: 11023 - DNA, 20 bp, Artificial Sequence
  Description of Artificial Sequence: Synthetic oligonucleotide
gctttccttccaagcccgaa

SEQ ID NO: 11024 - DNA, 20 bp, Artificial Sequence
  Description of Artificial Sequence: Synthetic oligonucleotide
ctttccttccaagcccgaat

SEQ ID NO: 11025 - DNA, 20 bp, Artificial Sequence
  Description of Artificial Sequence: Synthetic oligonucleotide
tttccttccaagcccgaatg

SEQ ID NO: 11026 - DNA, 20 bp, Artificial Sequence
  Description of Artificial Sequence: Synthetic oligonucleotide
ttccttccaagcccgaatgc

SEQ ID NO: 11027 - DNA, 20 bp, Artificial Sequence
  Description of Artificial Sequence: Synthetic oligonucleotide
tccttccaagcccgaatgct

SEQ ID NO: 11028 - DNA, 20 bp, Artificial Sequence
  Description of Artificial Sequence: Synthetic oligonucleotide
ccttccaagcccgaatgctc

SEQ ID NO: 11029 - DNA, 20 bp, Artificial Sequence
  Description of Artificial Sequence: Synthetic oligonucleotide
cttccaagcccgaatgctcc

SEQ ID NO: 11030 - DNA, 20 bp, Artificial Sequence
  Description of Artificial Sequence: Synthetic oligonucleotide
ttccaagcccgaatgctcca

SEQ ID NO: 11031 - DNA, 20 bp, Artificial Sequence
  Description of Artificial Sequence: Synthetic oligonucleotide
tccaagcccgaatgctccac

SEQ ID NO: 11032 - DNA, 20 bp, Artificial Sequence
  Description of Artificial Sequence: Synthetic oligonucleotide
ccaagcccgaatgctccaca

SEQ ID NO: 11033 - DNA, 20 bp, Artificial Sequence
  Description of Artificial Sequence: Synthetic oligonucleotide
caagcccgaatgctccacaa

SEQ ID NO: 11034 - DNA, 20 bp, Artificial Sequence
  Description of Artificial Sequence: Synthetic oligonucleotide
aagcccgaatgctccacaag

SEQ ID NO: 11035 - DNA, 20 bp, Artificial Sequence
  Description of Artificial Sequence: Synthetic oligonucleotide
agcccgaatgctccacaagt

SEQ ID NO: 11036 - DNA, 20 bp, Artificial Sequence
  Description of Artificial Sequence: Synthetic oligonucleotide
gcccgaatgctccacaagtc

SEQ ID NO: 11037 - DNA, 20 bp, Artificial Sequence
  Description of Artificial Sequence: Synthetic oligonucleotide
cccgaatgctccacaagtca

SEQ ID NO: 11038 - DNA, 20 bp, Artificial Sequence
  Description of Artificial Sequence: Synthetic oligonucleotide
ccgaatgctccacaagtcag

SEQ ID NO: 11039 - DNA, 20 bp, Artificial Sequence
  Description of Artificial Sequence: Synthetic oligonucleotide
cgaatgctccacaagtcagc

SEQ ID NO: 11040 - DNA, 20 bp, Artificial Sequence
  Description of Artificial Sequence: Synthetic oligonucleotide
gaatgctccacaagtcagca

SEQ ID NO: 11041 - DNA, 20 bp, Artificial Sequence
  Description of Artificial Sequence: Synthetic oligonucleotide
aatgctccacaagtcagcat

SEQ ID NO: 11042 - DNA, 20 bp, Artificial Sequence
  Description of Artificial Sequence: Synthetic oligonucleotide
atgctccacaagtcagcatc

SEQ ID NO: 11043 - DNA, 20 bp, Artificial Sequence
  Description of Artificial Sequence: Synthetic oligonucleotide
tgctccacaagtcagcatct

SEQ ID NO: 11044 - DNA, 20 bp, Artificial Sequence
  Description of Artificial Sequence: Synthetic oligonucleotide
gctccacaagtcagcatctt

SEQ ID NO: 11045 - DNA, 20 bp, Artificial Sequence
  Description of Artificial Sequence: Synthetic oligonucleotide
ctccacaagtcagcatctta

SEQ ID NO: 11046 - DNA, 20 bp, Artificial Sequence
  Description of Artificial Sequence: Synthetic oligonucleotide
tccacaagtcagcatcttaa

SEQ ID NO: 11047 - DNA, 20 bp, Artificial Sequence
  Description of Artificial Sequence: Synthetic oligonucleotide
ccacaagtcagcatcttaaa

SEQ ID NO: 11048 - DNA, 20 bp, Artificial Sequence
  Description of Artificial Sequence: Synthetic oligonucleotide
cacaagtcagcatcttaaat

SEQ ID NO: 11049 - DNA, 20 bp, Artificial Sequence
  Description of Artificial Sequence: Synthetic oligonucleotide
acaagtcagcatcttaaata

SEQ ID NO: 11050 - DNA, 20 bp, Artificial Sequence
  Description of Artificial Sequence: Synthetic oligonucleotide
caagtcagcatcttaaatat

SEQ ID NO: 11051 - DNA, 20 bp, Artificial Sequence
  Description of Artificial Sequence: Synthetic oligonucleotide
aagtcagcatcttaaatatt

SEQ ID NO: 11052 - DNA, 20 bp, Artificial Sequence
  Description of Artificial Sequence: Synthetic oligonucleotide
agtcagcatcttaaatattg

SEQ ID NO: 11053 - DNA, 20 bp, Artificial Sequence
  Description of Artificial Sequence: Synthetic oligonucleotide
gtcagcatcttaaatattgt

SEQ ID NO: 11054 - DNA, 20 bp, Artificial Sequence
  Description of Artificial Sequence: Synthetic oligonucleotide
tcagcatcttaaatattgtt

SEQ ID NO: 11055 - DNA, 20 bp, Artificial Sequence
  Description of Artificial Sequence: Synthetic oligonucleotide
cagcatcttaaatattgttt

SEQ ID NO: 11056 - DNA, 20 bp, Artificial Sequence
  Description of Artificial Sequence: Synthetic oligonucleotide
agcatcttaaatattgtttg

SEQ ID NO: 11057 - DNA, 20 bp, Artificial Sequence
  Description of Artificial Sequence: Synthetic oligonucleotide
gcatcttaaatattgtttgc

SEQ ID NO: 11058 - DNA, 20 bp, Artificial Sequence
  Description of Artificial Sequence: Synthetic oligonucleotide
catcttaaatattgtttgct

SEQ ID NO: 11059 - DNA, 20 bp, Artificial Sequence
  Description of Artificial Sequence: Synthetic oligonucleotide
atcttaaatattgtttgctg

SEQ ID NO: 11060 - DNA, 20 bp, Artificial Sequence
  Description of Artificial Sequence: Synthetic oligonucleotide
tcttaaatattgtttgctgc

SEQ ID NO: 11061 - DNA, 20 bp, Artificial Sequence
  Description of Artificial Sequence: Synthetic oligonucleotide
cttaaatattgtttgctgcc

SEQ ID NO: 11062 - DNA, 20 bp, Artificial Sequence
  Description of Artificial Sequence: Synthetic oligonucleotide
ttaaatattgtttgctgcct

SEQ ID NO: 11063 - DNA, 20 bp, Artificial Sequence
  Description of Artificial Sequence: Synthetic oligonucleotide
taaatattgtttgctgcctg

SEQ ID NO: 11064 - DNA, 20 bp, Artificial Sequence
  Description of Artificial Sequence: Synthetic oligonucleotide
aaatattgtttgctgcctgt

SEQ ID NO: 11065 - DNA, 20 bp, Artificial Sequence
  Description of Artificial Sequence: Synthetic oligonucleotide
aatattgtttgctgcctgta

SEQ ID NO: 11066 - DNA, 20 bp, Artificial Sequence
  Description of Artificial Sequence: Synthetic oligonucleotide
atattgtttgctgcctgtac

SEQ ID NO: 11067 - DNA, 20 bp, Artificial Sequence
  Description of Artificial Sequence: Synthetic oligonucleotide
tattgtttgctgcctgtacc

SEQ ID NO: 11068 - DNA, 20 bp, Artificial Sequence
  Description of Artificial Sequence: Synthetic oligonucleotide
attgtttgctgcctgtacct

SEQ ID NO: 11069 - DNA, 20 bp, Artificial Sequence
  Description of Artificial Sequence: Synthetic oligonucleotide
ttgtttgctgcctgtacctc

SEQ ID NO: 11070 - DNA, 20 bp, Artificial Sequence
  Description of Artificial Sequence: Synthetic oligonucleotide
tgtttgctgcctgtacctcc

SEQ ID NO: 11071 - DNA, 20 bp, Artificial Sequence
  Description of Artificial Sequence: Synthetic oligonucleotide
gtttgctgcctgtacctcca

SEQ ID NO: 11072 - DNA, 20 bp, Artificial Sequence
  Description of Artificial Sequence: Synthetic oligonucleotide
tttgctgcctgtacctccac

SEQ ID NO: 11073 - DNA, 20 bp, Artificial Sequence
  Description of Artificial Sequence: Synthetic oligonucleotide
ttgctgcctgtacctccacc

SEQ ID NO: 11074 - DNA, 20 bp, Artificial Sequence
  Description of Artificial Sequence: Synthetic oligonucleotide
tgctgcctgtacctccaccc

SEQ ID NO: 11075 - DNA, 20 bp, Artificial Sequence
  Description of Artificial Sequence: Synthetic oligonucleotide
gctgcctgtacctccacccc

SEQ ID NO: 11076 - DNA, 20 bp, Artificial Sequence
  Description of Artificial Sequence: Synthetic oligonucleotide
ctgcctgtacctccacccct

SEQ ID NO: 11077 - DNA, 20 bp, Artificial Sequence
  Description of Artificial Sequence: Synthetic oligonucleotide
tgcctgtacctccaccccta

SEQ ID NO: 11078 - DNA, 20 bp, Artificial Sequence
  Description of Artificial Sequence: Synthetic oligonucleotide
gcctgtacctccacccctac

SEQ ID NO: 11079 - DNA, 20 bp, Artificial Sequence
  Description of Artificial Sequence: Synthetic oligonucleotide
cctgtacctccacccctacc

SEQ ID NO: 11080 - DNA, 20 bp, Artificial Sequence
  Description of Artificial Sequence: Synthetic oligonucleotide
ctgtacctccacccctacca

SEQ ID NO: 11081 - DNA, 20 bp, Artificial Sequence
  Description of Artificial Sequence: Synthetic oligonucleotide
tgtacctccacccctaccat

SEQ ID NO: 11082 - DNA, 20 bp, Artificial Sequence
  Description of Artificial Sequence: Synthetic oligonucleotide
gtacctccacccctaccatg

SEQ ID NO: 11083 - DNA, 20 bp, Artificial Sequence
  Description of Artificial Sequence: Synthetic oligonucleotide
tacctccacccctaccatgg

SEQ ID NO: 11084 - DNA, 20 bp, Artificial Sequence
  Description of Artificial Sequence: Synthetic oligonucleotide
acctccacccctaccatggc

SEQ ID NO: 11085 - DNA, 2224 bp, Homo sapiens
gggcttggaaggaaagctataggctacccattcagctcccctgtcagagactcaagctttgagaaaggctagcaaagagcaaggaaagagagaaaacaacaaagtggcgaggccctcagagtgaaagcgtaaggttcagtcagcctgctgcagctttgcagacctcagctgggcatctccagactcccctgaaggaagagccttcctcacccaaacccacaaaagatgctgaaaaagcctctctcagctgtgacctggctctgcattttcatcgtggcctttgtcagccacccagcgtggctgcagaagctctctaagcacaagacaccagcacagccacagctcaaagcggccaactgctgtgaggaggtgaaggagctcaaggcccaagttgccaaccttagcagcctgctgagtgaactgaacaagaagcaggagagggactgggtcagcgtggtcatgcaggtgatggagctggagagcaacagcaagcgcatggagtcgcggctcacagatgctgagagcaagtactccgagatgaacaaccaaattgacatcatgcagctgcaggcagcacagacggtcactcagacctccgcagatgccatctacgactgctcttccctctaccagaagaactaccgcatctctggagtgtataagcttcctcctgatgacttcctgggcagccctgaactggaggtgttctgtgacatggagacttcaggcggaggctggaccatcatccagagacgaaaaagtggccttgtctccttctaccgggactggaagcagtacaagcagggctttggcagcatccgtggggacttctggctggggaacgaacacatccaccggctctccagacagccaacccggctgcgtgtagagatggaggactgggagggcaacctgcgctacgctgagtatagccactttgttttgggcaatgaactcaacagctatcgcctcttcctggggaactacactggcaatgtggggaacgacgccctccagtatcataacaacacagccttcagcaccaaggacaaggacaatgacaactgcttggacaagtgtgcacagctccgcaaaggtggctactggtacaactgctgcacagactccaacctcaatggagtgtactaccgcctgggtgagcacaataagcacctggatggcatcacctggtatggctggcatggatctacctactccctcaaacgggtggagatgaaaatccgcccagaagacttcaagccttaaaaggaggctgccgtggagcacggatacagaaactgagacacgtggagactggatgagggcagatgaggacaggaagagagtgttagaaagggtaggactgagaaacagcctataatctccaaagaaagaataagtctccaaggagcacaaaaaaatcatatgtaccaaggatgttacagtaaacaggatgaactatttaaacccactgggtcctgccacatccttctcaaggtggtagactgagtggggtctctctgcccaagatccctgacatagcagtagcttgtcttttccacatgatttgtctgtgaaagaaaataattttgagatcgttttatctattttctctacggcttaggctatgtgagggcaaaacacaaatccctttgctaaaaagaaccatattattttgattctcaaaggataggcctttgagtgttagagaaaggagtgaaggaggcaggtgggaaatggtatttctatttttaaatccagtgaaattatcttgagtctacacattatttttaaaacacaaaaattgttcggctggaactgacccaggctggacttgcggggaggaaactccagggcactgcatctggcgatcagactctgagcactgcccctgctcgccttggtcatgtacagcactgaaaggaatgaagcaccagcaggaggtggacagagtctctcatggatgccggcacaaaactgccttaaaatattcatagttaatacaggtatatctatttttatttactttgtaagaaacaagctcaaggagcttccttttaaattttgtctgtaggaaatggttgaaaactgaaggtagatggtgttatagttaataataaatgctgtaaataagcatctcactttgtaaaaataaaatattgtggttttgttttaaacattcaacgtttcttttccttctacaataaacactttcaaaatgtga

SEQ ID NO: 11086 - DNA, 6693 bp, Homo sapiens
cagccatggtaggggtggaggtacaggcagcaaacaatatttaagatgctgacttgtggagcattcgggcttggaaggaaagctataggctacccattcagctcccctgtcagagactcaagctttgagaaaggctagcaaagagcaaggaaagagagaaaacaacaaagtggcgaggccctcagagtgaaagcgtaaggttcagtcagcctgctgcagctttgcagacctcagctgggcatctccagactcccctgaaggaagagccttcctcacccaaacccacaaaagatgctgaaaaagcctctctcagctgtgacctggctctgcattttcatcgtggcctttgtcagccacccagcgtggctgcagaagctctctaagcacaagacaccagcacagccacagctcaaagcggccaactgctgtgaggaggtgaaggagctcaaggcccaagttgccaaccttagcagcctgctgagtgaactgaacaagaagcaggagagggactgggtcagcgtggtcatgcaggtgatggagctggagagcaacagcaagcgcatggagtcgcggctcacagatgctgagagcaagtactccgagatgaacaaccaaattgacatcatgcagctgcaggcagcacagacggtcactcagacctccgcaggtaaggagaccagtcccctgagggagcgtggagtgcctccccatctacagcactgcttctacatatcctggtcatcagaaccactactggggcctcttttgtgggtacactttccctttagtaaaggcttatgcagtatttcctttgacttctaatgctatgtaagtttacctaacaccttcacgggtctcttttatccacacagtgtttcagcctaccatcttggagtgctgagatactacatggtttgcccaaagtcacccagcaagtcttagaagcagggttcaagtcttcctgattggtgtagctctgctacttcctcaccaagagctgacaggctatatctcaagaaattccaaggaagcaccaaactgtaacagctgttcctctggaagcaaagttttgccagaaacagttctctggtgttcctaagatttaccaggaatgagcattaatggaattttgtgtcctctctctgtaaacgtaactcttctcattggctcagagttaagtgtagagacacataaccatgtgaagagtccctttgtgttcaggaaggatgcggctccttaaggttcctcaattgtgatacgtctatttttttccatggtcttaaatgaatttctccgaatacaggattttttaaatgcaatgctgaaatatagacttaataggccaaaaataagataaatttaatctttcttttgcaaaataacttttatttctggttagctcagctcaggtgggccaacatgaatttacggtttagagataaaaatttggttttctgaaattatcaggaaaatattagttgtaaggagcatatcctatagacatgtcatttcttgctgatataaaaaccattggtcccattataaactacatgaagaacaaagacatgatcagcttctactgactaagtcaatggttaacctcagctcaaattaagaaaaagttttaacatgaaaccaagcttgaaaattctgttacctgaaccaacatgtatcaatcactttctaagcatggacttccgggccctcagtttgggattagaaaggtattctcaggccattttccagacaagtgagtcctgatttggtctgtgagatgaaaccagacatgcggaagaccaggccagacagaggaatctgaccgtgccacttcctgctcatccaaacaggaggctttctcaccatcctgcaaggaggttcttggggtcaagtgcagctctcccaccaggtctcttgctcttcttgcccaggacatcattccttatttttcttctctatgaccaagtgctcagttacccttatattctataagtaggtagtcccttagaggaagcagtaagttggtgctttcaccactaagacgaaatgaagaatagtgatggcgaaggcacacgtactctacctccctttcccaaggtgctctgcaagagaacctatgtgcctcagacaactcccatctgccatcttggtgctcctctctaaggtcccagtgcagtggtcaccaagaaaagcaccccgagacatagcaggcaggaagcttctcttggatagtaagggccgcagtctctgaatcctatcagaaaaggctgtctcttccactatgctctttgatatttagaatacagagcttaaatcctgcataaagtagcagctccatggccctagagtaaaaaaactggccagtctgatgctctcatttcattgttttaacaaaacttctgggaggaaggcctcaaaggttcttctgagtgttttgaggtgctagctggatggaaggggaaaatatgtgataataaaatctatctcccttaattatggtctcaggtggcagtagccaccatctctgaacaacaacaaaaacaaccaaccaggaaacatcaacaaaaccagactctatgagatattcacgactgatttgttatagtggcggctgtctaagaagtctgaatctatctgacaggagtatctgttacgtggccctcatacactgtaacatttctagaattcatggcccagctatagcagaataatttatttcagagttaacctgaaaccacctgttggaacgtcccactaatgctatccaggtgaagggcttccctacccctctgctccaccgctagtaaagccaaaatacaccccctctggatctccccatatccacctctcccaaatgcagacactgatgggtaattaacaccactgagaatcccagggtagaaataaaggctcagtctctaaacactcaactcagatggagccactgggtctaaatgctcaccctgtggtttgttctcttgtagatgccatctacgactgctcttccctctaccagaagaactaccgcatctctggagtgtataagcttcctcctgatgacttcctgggcagccctgaactggaggtgaggtcattacagtcactggccatgccctaatacctgtccttcaccccctcaaggggactacaacaacagggccattcacagtttaaagaaaggaaaattcggctgggcgcagtggctcacacctgtaatcccagcactatgggaggccgaggcaggtggatcacttcaggtcaggagtttaagaccagcctggccaacatggtgaaaccctgtctctactaaaaatacaaaaaaattagccaggcatggtggtgggcacctgtaatccctgctacacaggaggattgcttgaactcaggaggcagaggttgcagtgagccgagatcacgccactgcactataatctgggagacaaagtgagactccatttcaattaaaaaaaaaaaaaaaaaaaaggaaaactcaaacacaagcaaacacaccaaacaccacagagctatgcaaacactcagtttatgccctgcactccaaacccaggcatctgtttggccccttcaaatcattatcagtcaaacaacaagccttctaacatagatcagatcattcttataaccaccacataacttagtttaaatctcttgccatgtcctagaacagctattccttgggggaggagaaaagaaaacacgaaggcagcatcaaattatctggattttcacccaggcatggtggctcacacctgtaatcccaagttttttgggaggtgaggtgggcggaacaatcacctgaggtcaggactttgagaccagcctggccaacatgctgaaacccagtctctactaaaaatacaaaaattagcccagtgtggtgacaggcactctggtcccagctactaggaaggcaggagaatcactggaactcaggaggtggaggttgcagtgagccgagattgcaccactgtactctagcctgggcaacaagagtgaaattctgcttcaaaaaaaaaaaaagtatctggatttttccctccaagcttcatgtgcactcacccccgggcccaatttgcatcgttcttccagagcaatgcaccacccaccccagctcaccagcagtggggcagcatcactgcccgagtgagccagtgtgactgcgggagtgcacacatctactggctctgcagggacaggaacaggttgggaagcctgccctcttgctcctgccttctgcccctgcaagtccctcaccagagtatcccctctgcttcaggtgttctgtgacatggagacttcaggcggaggctggaccatcatccagagacgaaaaagtggccttgtctccttctaccgggactggaagcagtacaagcagggctttggcagcatccgtggggacttctggctggggaacgaacacatccaccggctctccagacagccaacccggctgcgtgtagagatggaggtaagcacaaggccaggggccccatgactggaccagtgccaccacacatgaccgcgtacaactccgggggtgccattcctattctgattcaagacaaatctgtatattcattgtgatggttttcctgcaagttgtaatggagttgaggaaaaataggtatttttcctttctgcaacccccccaaccccccgacaaaagtggggctgcaggtgggacaggaagaggccagacccaggccagagtagagcaaattcaacagtcagctgtgccgaacactagtctctgctctggccgagcatgaggtcctttaggtgcaaatcttactgatactgtttggggacccttgctgaaggtctgaaagcactcactatatcctcatgtttctcttacagcagctctgtgtgggattcagcaaaaacatagctgcaccttataagcaggaaagtgaggaatatagaaagagagactaatcaaggccatatggtgaatcaggaaagaagttcgagccttgttttctgattcccaggttaacacagtaaactggaggtaaacaagtaataaagtcttattagattcacacctataaaaagatgtttggctatgggactgtcaggagagaaggggtatagagacagcatgaaatggagcctgctgcactttctttaaggctctgctcctcctgacaggactgggagggcaacctgcgctacgctgagtatagccactttgttttgggcaatgaactcaacagctatcgcctcttcctggggaactacactggcaatgtggggaacgacgccctccagtatcataacaacacagccttcagcaccaaggacaaggacaatgacaactgcttggacaagtgtgcacagctccgcaaaggtgagatttggggggaccggaaaggagaagttcaggtacaagctcataatcccacttgaggagaaagagtgaattataactgtacagttgatattccggttttggtattctttctgaccctggctctaactccttacctgatgtctggtctatcacagtcaacttactagcactgggtctgtttctcatgccaggtggctactggtacaactgctgcacagactccaacctcaatggagtgtactaccgcctgggtgagcacaataagcacctggatggcatcacctggtatggctggcatggatctacctactccctcaaacgggtggagatgaaaatccgcccagaagacttcaagccttaaaaggaggctgccgtggagcacggatacagaaactgagacacgtggagactggatgagggcagatgaggacaggaagagagtgttagaaagggtaggactgagaaacagcctataatctccaaagaaagaataagtctccaaggagcacaaaaaaatcatatgtaccaaggatgttacagtaaacaggatgaactatttaaacccactgggtcctgccacatccttctcaaggtggtagactgagtggggtctctctgcccaagatccctgacatagcagtagcttgtcttttccacatgatttgtctgtgaaagaaaataattttgagatcgttttatctattttctctacggcttaggctatgtgagggcaaaacacaaatccctttgctaaaaagaaccatattattttgattctcaaaggataggcctttgagtgttagagaaaggagtgaaggaggcaggtgggaaatggtatttctatttttaaatccagtgaaattatcttgagtctacacattatttttaaaacacaaaaattgttcggctggaactgacccaggctggacttgcggggaggaaactccagggcactgcatctggcgatcagactctgagcactgcccctgctcgccttggtcatgtacagcactgaaaggaatgaagcaccagcaggaggtggacagagtctctcatggatgccggcacaaaactgccttaaaatattcatagttaatacaggtatatctatttttatttactttgtaagaaacaagctcaaggagcttccttttaaattttgtctgtaggaaatggttgaaaactgaaggtagatggtgttatagttaataataaatgctgtaaataagcatctcactttgtaaaaataaaatattgtggttttgttttaaacattcaacgtttcttttccttctacaataaacactttcaaaatgtga

SEQ ID NO: 11087 - DNA, 20 bp, Artificial Sequence
  Description of Artificial Sequence: Synthetic oligonucleotide
  modified_base (1)..(1): 2' O-methyl modified nucleoside
  misc_feature (1)..(2): Phosphorothioate linkage
  modified_base (2)..(2): 2' O-methyl modified nucleoside
  misc_feature (2)..(3): Phosphorothioate linkage
  modified_base (3)..(3): 2' O-methyl modified nucleoside
  misc_feature (3)..(4): Phosphorothioate linkage
  modified_base (4)..(4): 2' O-methyl modified nucleoside
  misc_feature (4)..(5): Phosphorothioate linkage
  modified_base (5)..(5): 2' O-methyl modified nucleoside
  misc_feature (5)..(6): Phosphorothioate linkage
  modified_base (6)..(6): Any deoxynucleotide
  misc_feature (6)..(7): Phosphorothioate linkage
  modified_base (7)..(7): Any deoxynucleotide
  misc_feature (7)..(8): Phosphorothioate linkage
  modified_base (8)..(8): Any deoxynucleotide
  misc_feature (8)..(9): Phosphorothioate linkage
  modified_base (9)..(9): Any deoxynucleotide
  misc_feature (9)..(10): Phosphorothioate linkage
  modified_base (10)..(10): Any deoxynucleotide
  misc_feature (10)..(11): Phosphorothioate linkage
  modified_base (11)..(11): Any deoxynucleotide
  misc_feature (11)..(12): Phosphorothioate linkage
  modified_base (12)..(12): Any deoxynucleotide
  misc_feature (12)..(13): Phosphorothioate linkage
  modified_base (13)..(13): Any deoxynucleotide
  misc_feature (13)..(14): Phosphorothioate linkage
  modified_base (14)..(14): Any deoxynucleotide
  misc_feature (14)..(15): Phosphorothioate linkage
  modified_base (15)..(15): Any deoxynucleotide
  misc_feature (15)..(16): Phosphorothioate linkage
  modified_base (16)..(16): 2' O-methyl modified nucleoside
  misc_feature (16)..(17): Phosphorothioate linkage
  modified_base (17)..(17): 2' O-methyl modified nucleoside
  misc_feature (17)..(18): Phosphorothioate linkage
  modified_base (18)..(18): 2' O-methyl modified nucleoside
  misc_feature (18)..(19): Phosphorothioate linkage
  modified_base (19)..(19): 2' O-methyl modified nucleoside
  misc_feature (19)..(20): Phosphorothioate linkage
  modified_base (20)..(20): 2' O-methyl modified nucleoside
ttgtaccagtagccaccttt

SEQ ID NO: 11088 - DNA, 20 bp, Artificial Sequence
  Description of Artificial Sequence: Synthetic oligonucleotide
  modified_base (1)..(1): 2' O-methyl modified nucleoside
  misc_feature (1)..(2): Phosphorothioate linkage
  modified_base (2)..(2): 2' O-methyl modified nucleoside
  misc_feature (2)..(3): Phosphorothioate linkage
  modified_base (3)..(3): 2' O-methyl modified nucleoside
  misc_feature (3)..(4): Phosphorothioate linkage
  modified_base (4)..(4): 2' O-methyl modified nucleoside
  misc_feature (4)..(5): Phosphorothioate linkage
  modified_base (5)..(5): 2' O-methyl modified nucleoside
  misc_feature (5)..(6): Phosphorothioate linkage
  modified_base (6)..(6): Any deoxynucleotide
  misc_feature (6)..(7): Phosphorothioate linkage
  modified_base (7)..(7): Any deoxynucleotide
  misc_feature (7)..(8): Phosphorothioate linkage
  modified_base (8)..(8): Any deoxynucleotide
  misc_feature (8)..(9): Phosphorothioate linkage
  modified_base (9)..(9): Any deoxynucleotide
  misc_feature (9)..(10): Phosphorothioate linkage
  modified_base (10)..(10): Any deoxynucleotide
  misc_feature (10)..(11): Phosphorothioate linkage
  modified_base (11)..(11): Any deoxynucleotide
  misc_feature (11)..(12): Phosphorothioate linkage
  modified_base (12)..(12): Any deoxynucleotide
  misc_feature (12)..(13): Phosphorothioate linkage
  modified_base (13)..(13): Any deoxynucleotide
  misc_feature (13)..(14): Phosphorothioate linkage
  modified_base (14)..(14): Any deoxynucleotide
  misc_feature (14)..(15): Phosphorothioate linkage
  modified_base (15)..(15): Any deoxynucleotide
  misc_feature (15)..(16): Phosphorothioate linkage
  modified_base (16)..(16): 2' O-methyl modified nucleoside
  misc_feature (16)..(17): Phosphorothioate linkage
  modified_base (17)..(17): 2' O-methyl modified nucleoside
  misc_feature (17)..(18): Phosphorothioate linkage
  modified_base (18)..(18): 2' O-methyl modified nucleoside
  misc_feature (18)..(19): Phosphorothioate linkage
  modified_base (19)..(19): 2' O-methyl modified nucleoside
  misc_feature (19)..(20): Phosphorothioate linkage
  modified_base (20)..(20): 2' O-methyl modified nucleoside
tctaaccgagctgatggact

SEQ ID NO: 11089 - RNA, 21 nt, Artificial Sequence
  Description of Artificial Sequence: Synthetic oligonucleotide
guacaacugcugcacagacuu

SEQ ID NO: 11090 - RNA, 21 nt, Artificial Sequence
  Description of Artificial Sequence: Synthetic oligonucleotide
gucugugcagcaguuguacuu

SEQ ID NO: 11091 - RNA, 21 nt, Artificial Sequence
  Description of Artificial Sequence: Synthetic oligonucleotide
guuguacagcaugcggagauu

SEQ ID NO: 11092 - RNA, 21 nt, Artificial Sequence
  Description of Artificial Sequence: Synthetic oligonucleotide
ucuccgcaugcuguacaacuu

SEQ ID NO: 11093 - RNA, 21 nt, Artificial Sequence
  Description of Artificial Sequence: Synthetic oligonucleotide
  modified_base (1)..(1): 2' fluoro-modified nucleoside
  misc_feature (1)..(2): Phosphorothioate linkage
  modified_base (2)..(2): 2' O-methyl modified nucleoside
  misc_feature (2)..(3): Phosphorothioate linkage
  modified_base (3)..(3): 2' fluoro-modified nucleoside
  modified_base (4)..(4): 2' O-methyl modified nucleoside
  modified_base (5)..(5): 2' fluoro-modified nucleoside
  modified_base (6)..(6): 2' O-methyl modified nucleoside
  modified_base (7)..(7): 2' fluoro-modified nucleoside
  modified_base (8)..(8): 2' fluoro-modified nucleoside
  modified_base (9)..(9): 2' fluoro-modified nucleoside
  modified_base (10)..(10): 2' O-methyl modified nucleoside
  modified_base (11)..(11): 2' fluoro-modified nucleoside
  modified_base (12)..(12): 2' O-methyl modified nucleoside
  modified_base (13)..(13): 2' fluoro-modified nucleoside
  modified_base (14)..(14): 2' O-methyl modified nucleoside
  modified_base (15)..(15): 2' fluoro-modified nucleoside
  modified_base (16)..(16): 2' O-methyl modified nucleoside
  modified_base (17)..(17): 2' fluoro-modified nucleoside
  modified_base (18)..(18): 2' O-methyl modified nucleoside
  modified_base (19)..(19): 2' fluoro-modified nucleoside
  misc_feature (19)..(20): Phosphorothioate linkage
  modified_base (20)..(20): 2' O-methyl modified nucleoside
  misc_feature (20)..(21): Phosphorothioate linkage
  modified_base (21)..(21): 2' O-methyl modified nucleoside
ggaaggaaagcuauaggcauu

SEQ ID NO: 11094 - RNA, 21 nt, Artificial Sequence
  Description of Artificial Sequence: Synthetic oligonucleotide
  modified_base (1)..(1): 2' fluoro-modified nucleoside
  misc_feature (1)..(2): Phosphorothioate linkage
  modified_base (2)..(2): 2' O-methyl modified nucleoside
  misc_feature (2)..(3): Phosphorothioate linkage
  modified_base (3)..(3): 2' fluoro-modified nucleoside
  modified_base (4)..(4): 2' O-methyl modified nucleoside
  modified_base (5)..(5): 2' fluoro-modified nucleoside
  modified_base (6)..(6): 2' O-methyl modified nucleoside
  modified_base (7)..(7): 2' fluoro-modified nucleoside
  modified_base (8)..(8): 2' fluoro-modified nucleoside
  modified_base (9)..(9): 2' fluoro-modified nucleoside
  modified_base (10)..(10): 2' O-methyl modified nucleoside
  modified_base (11)..(11): 2' fluoro-modified nucleoside
  modified_base (12)..(12): 2' O-methyl modified nucleoside
  modified_base (13)..(13): 2' fluoro-modified nucleoside
  modified_base (14)..(14): 2' O-methyl modified nucleoside
  modified_base (15)..(15): 2' fluoro-modified nucleoside
  modified_base (16)..(16): 2' O-methyl modified nucleoside
  modified_base (17)..(17): 2' fluoro-modified nucleoside
  modified_base (18)..(18): 2' O-methyl modified nucleoside
  modified_base (19)..(19): 2' fluoro-modified nucleoside
  misc_feature (19)..(20): Phosphorothioate linkage
  modified_base (20)..(20): 2' O-methyl modified nucleoside
  misc_feature (20)..(21): Phosphorothioate linkage
  modified_base (21)..(21): 2' O-methyl modified nucleoside
cccugucagagacucaagauu

SEQ ID NO: 11095 - RNA, 21 nt, Artificial Sequence
  Description of Artificial Sequence: Synthetic oligonucleotide
  modified_base (1)..(1): 2' fluoro-modified nucleoside
  misc_feature (1)..(2): Phosphorothioate linkage
  modified_base (2)..(2): 2' O-methyl modified nucleoside
  misc_feature (2)..(3): Phosphorothioate linkage
  modified_base (3)..(3): 2' fluoro-modified nucleoside
  modified_base (4)..(4): 2' O-methyl modified nucleoside
  modified_base (5)..(5): 2' fluoro-modified nucleoside
  modified_base (6)..(6): 2' O-methyl modified nucleoside
  modified_base (7)..(7): 2' fluoro-modified nucleoside
  modified_base (8)..(8): 2' fluoro-modified nucleoside
  modified_base (9)..(9): 2' fluoro-modified nucleoside
  modified_base (10)..(10): 2' O-methyl modified nucleoside
  modified_base (11)..(11): 2' fluoro-modified nucleoside
  modified_base (12)..(12): 2' O-methyl modified nucleoside
  modified_base (13)..(13): 2' fluoro-modified nucleoside
  modified_base (14)..(14): 2' O-methyl modified nucleoside
  modified_base (15)..(15): 2' fluoro-modified nucleoside
  modified_base (16)..(16): 2' O-methyl modified nucleoside
  modified_base (17)..(17): 2' fluoro-modified nucleoside
  modified_base (18)..(18): 2' O-methyl modified nucleoside
  modified_base (19)..(19): 2' fluoro-modified nucleoside
  misc_feature (19)..(20): Phosphorothioate linkage
  modified_base (20)..(20): 2' O-methyl modified nucleoside
  misc_feature (20)..(21): Phosphorothioate linkage
  modified_base (21)..(21): 2' O-methyl modified nucleoside
gaaaacaacaaaguggcgauu

SEQ ID NO: 11096 - RNA, 21 nt, Artificial Sequence
  Description of Artificial Sequence: Synthetic oligonucleotide
  modified_base (1)..(1): 2' fluoro-modified nucleoside
  misc_feature (1)..(2): Phosphorothioate linkage
  modified_base (2)..(2): 2' O-methyl modified nucleoside
  misc_feature (2)..(3): Phosphorothioate linkage
  modified_base (3)..(3): 2' fluoro-modified nucleoside
  modified_base (4)..(4): 2' O-methyl modified nucleoside
  modified_base (5)..(5): 2' fluoro-modified nucleoside
  modified_base (6)..(6): 2' O-methyl modified nucleoside
  modified_base (7)..(7): 2' fluoro-modified nucleoside
  modified_base (8)..(8): 2' fluoro-modified nucleoside
  modified_base (9)..(9): 2' fluoro-modified nucleoside
  modified_base (10)..(10): 2' O-methyl modified nucleoside
  modified_base (11)..(11): 2' fluoro-modified nucleoside
  modified_base (12)..(12): 2' O-methyl modified nucleoside
  modified_base (13)..(13): 2' fluoro-modified nucleoside
  modified_base (14)..(14): 2' O-methyl modified nucleoside
  modified_base (15)..(15): 2' fluoro-modified nucleoside
  modified_base (16)..(16): 2' O-methyl modified nucleoside
  modified_base (17)..(17): 2' fluoro-modified nucleoside
  modified_base (18)..(18): 2' O-methyl modified nucleoside
  modified_base (19)..(19): 2' fluoro-modified nucleoside
  misc_feature (19)..(20): Phosphorothioate linkage
  modified_base (20)..(20): 2' O-methyl modified nucleoside
  misc_feature (20)..(21): Phosphorothioate linkage
  modified_base (21)..(21): 2' O-methyl modified nucleoside
aaacaacaaaguggcgagauu

SEQ ID NO: 11097 - RNA, 21 nt, Artificial Sequence
  Description of Artificial Sequence: Synthetic oligonucleotide
  modified_base (1)..(1): 2' fluoro-modified nucleoside
  misc_feature (1)..(2): Phosphorothioate linkage
  modified_base (2)..(2): 2' O-methyl modified nucleoside
  misc_feature (2)..(3): Phosphorothioate linkage
  modified_base (3)..(3): 2' fluoro-modified nucleoside
  modified_base (4)..(4): 2' O-methyl modified nucleoside
  modified_base (5)..(5): 2' fluoro-modified nucleoside
  modified_base (6)..(6): 2' O-methyl modified nucleoside
  modified_base (7)..(7): 2' fluoro-modified nucleoside
  modified_base (8)..(8): 2' fluoro-modified nucleoside
  modified_base (9)..(9): 2' fluoro-modified nucleoside
  modified_base (10)..(10): 2' O-methyl modified nucleoside
  modified_base (11)..(11): 2' fluoro-modified nucleoside
  modified_base (12)..(12): 2' O-methyl modified nucleoside
  modified_base (13)..(13): 2' fluoro-modified nucleoside
  modified_base (14)..(14): 2' O-methyl modified nucleoside
  modified_base (15)..(15): 2' fluoro-modified nucleoside
  modified_base (16)..(16): 2' O-methyl modified nucleoside
  modified_base (17)..(17): 2' fluoro-modified nucleoside
  modified_base (18)..(18): 2' O-methyl modified nucleoside
  modified_base (19)..(19): 2' fluoro-modified nucleoside
  misc_feature (19)..(20): Phosphorothioate linkage
  modified_base (20)..(20): 2' O-methyl modified nucleoside
  misc_feature (20)..(21): Phosphorothioate linkage
  modified_base (21)..(21): 2' O-methyl modified nucleoside
cccucagagugaaagcguauu

SEQ ID NO: 11098 - RNA, 21 nt, Artificial Sequence
  Description of Artificial Sequence: Synthetic oligonucleotide
  modified_base (1)..(1): 2' fluoro-modified nucleoside
  misc_feature (1)..(2): Phosphorothioate linkage
  modified_base (2)..(2): 2' O-methyl modified nucleoside
  misc_feature (2)..(3): Phosphorothioate linkage
  modified_base (3)..(3): 2' fluoro-modified nucleoside
  modified_base (4)..(4): 2' O-methyl modified nucleoside
  modified_base (5)..(5): 2' fluoro-modified nucleoside
  modified_base (6)..(6): 2' O-methyl modified nucleoside
  modified_base (7)..(7): 2' fluoro-modified nucleoside
  modified_base (8)..(8): 2' fluoro-modified nucleoside
  modified_base (9)..(9): 2' fluoro-modified nucleoside
  modified_base (10)..(10): 2' O-methyl modified nucleoside
  modified_base (11)..(11): 2' fluoro-modified nucleoside
  modified_base (12)..(12): 2' O-methyl modified nucleoside
  modified_base (13)..(13): 2' fluoro-modified nucleoside
  modified_base (14)..(14): 2' O-methyl modified nucleoside
  modified_base (15)..(15): 2' fluoro-modified nucleoside
  modified_base (16)..(16): 2' O-methyl modified nucleoside
  modified_base (17)..(17): 2' fluoro-modified nucleoside
  modified_base (18)..(18): 2' O-methyl modified nucleoside
  modified_base (19)..(19): 2' fluoro-modified nucleoside
  misc_feature (19)..(20): Phosphorothioate linkage
  modified_base (20)..(20): 2' O-methyl modified nucleoside
  misc_feature (20)..(21): Phosphorothioate linkage
  modified_base (21)..(21): 2' O-methyl modified nucleoside
ccucagagugaaagcguaauu

SEQ ID NO: 11099 - RNA, 21 nt, Artificial Sequence
  Description of Artificial Sequence: Synthetic oligonucleotide
  modified_base (1)..(1): 2' fluoro-modified nucleoside
  misc_feature (1)..(2): Phosphorothioate linkage
  modified_base (2)..(2): 2' O-methyl modified nucleoside
  misc_feature (2)..(3): Phosphorothioate linkage
  modified_base (3)..(3): 2' fluoro-modified nucleoside
  modified_base (4)..(4): 2' O-methyl modified nucleoside
  modified_base (5)..(5): 2' fluoro-modified nucleoside
  modified_base (6)..(6): 2' O-methyl modified nucleoside
  modified_base (7)..(7): 2' fluoro-modified nucleoside
  modified_base (8)..(8): 2' fluoro-modified nucleoside
  modified_base (9)..(9): 2' fluoro-modified nucleoside
  modified_base (10)..(10): 2' O-methyl modified nucleoside
  modified_base (11)..(11): 2' fluoro-modified nucleoside
  modified_base (12)..(12): 2' O-methyl modified nucleoside
  modified_base (13)..(13): 2' fluoro-modified nucleoside
  modified_base (14)..(14): 2' O-methyl modified nucleoside
  modified_base (15)..(15): 2' fluoro-modified nucleoside
  modified_base (16)..(16): 2' O-methyl modified nucleoside
  modified_base (17)..(17): 2' fluoro-modified nucleoside
  modified_base (18)..(18): 2' O-methyl modified nucleoside
  modified_base (19)..(19): 2' fluoro-modified nucleoside
  misc_feature (19)..(20): Phosphorothioate linkage
  modified_base (20)..(20): 2' O-methyl modified nucleoside
  misc_feature (20)..(21): Phosphorothioate linkage
  modified_base (21)..(21): 2' O-methyl modified nucleoside
cucagagugaaagcguaaauu

SEQ ID NO: 11100 - RNA, 21 nt, Artificial Sequence
  Description of Artificial Sequence: Synthetic oligonucleotide
  modified_base (1)..(1): 2' fluoro-modified nucleoside
  misc_feature (1)..(2): Phosphorothioate linkage
  modified_base (2)..(2): 2' O-methyl modified nucleoside
  misc_feature (2)..(3): Phosphorothioate linkage
  modified_base (3)..(3): 2' fluoro-modified nucleoside
  modified_base (4)..(4): 2' O-methyl modified nucleoside
  modified_base (5)..(5): 2' fluoro-modified nucleoside
  modified_base (6)..(6): 2' O-methyl modified nucleoside
  modified_base (7)..(7): 2' fluoro-modified nucleoside
  modified_base (8)..(8): 2' fluoro-modified nucleoside
  modified_base (9)..(9): 2' fluoro-modified nucleoside
  modified_base (10)..(10): 2' O-methyl modified nucleoside
  modified_base (11)..(11): 2' fluoro-modified nucleoside
  modified_base (12)..(12): 2' O-methyl modified nucleoside
  modified_base (13)..(13): 2' fluoro-modified nucleoside
  modified_base (14)..(14): 2' O-methyl modified nucleoside
  modified_base (15)..(15): 2' fluoro-modified nucleoside
  modified_base (16)..(16): 2' O-methyl modified nucleoside
  modified_base (17)..(17): 2' fluoro-modified nucleoside
  modified_base (18)..(18): 2' O-methyl modified nucleoside
  modified_base (19)..(19): 2' fluoro-modified nucleoside
  misc_feature (19)..(20): Phosphorothioate linkage
  modified_base (20)..(20): 2' O-methyl modified nucleoside
  misc_feature (20)..(21): Phosphorothioate linkage
  modified_base (21)..(21): 2' O-methyl modified nucleoside
cagagugaaagcguaaggauu

SEQ ID NO: 11101 - RNA, 21 nt, Artificial Sequence
  Description of Artificial Sequence: Synthetic oligonucleotide
  modified_base (1)..(1): 2' fluoro-modified nucleoside
  misc_feature (1)..(2): Phosphorothioate linkage
  modified_base (2)..(2): 2' O-methyl modified nucleoside
  misc_feature (2)..(3): Phosphorothioate linkage
  modified_base (3)..(3): 2' fluoro-modified nucleoside
  modified_base (4)..(4): 2' O-methyl modified nucleoside
  modified_base (5)..(5): 2' fluoro-modified nucleoside
  modified_base (6)..(6): 2' O-methyl modified nucleoside
  modified_base (7)..(7): 2' fluoro-modified nucleoside
  modified_base (8)..(8): 2' fluoro-modified nucleoside
  modified_base (9)..(9): 2' fluoro-modified nucleoside
  modified_base (10)..(10): 2' O-methyl modified nucleoside
  modified_base (11)..(11): 2' fluoro-modified nucleoside
  modified_base (12)..(12): 2' O-methyl modified nucleoside
  modified_base (13)..(13): 2' fluoro-modified nucleoside
  modified_base (14)..(14): 2' O-methyl modified nucleoside
  modified_base (15)..(15): 2' fluoro-modified nucleoside
  modified_base (16)..(16): 2' O-methyl modified nucleoside
  modified_base (17)..(17): 2' fluoro-modified nucleoside
  modified_base (18)..(18): 2' O-methyl modified nucleoside
  modified_base (19)..(19): 2' fluoro-modified nucleoside
  misc_feature (19)..(20): Phosphorothioate linkage
  modified_base (20)..(20): 2' O-methyl modified nucleoside
  misc_feature (20)..(21): Phosphorothioate linkage
  modified_base (21)..(21): 2' O-methyl modified nucleoside
agagugaaagcguaagguauu

SEQ ID NO: 11102 - RNA, 21 nt, Artificial Sequence
  Description of Artificial Sequence: Synthetic oligonucleotide
  modified_base (1)..(1): 2' fluoro-modified nucleoside
  misc_feature (1)..(2): Phosphorothioate linkage
  modified_base (2)..(2): 2' O-methyl modified nucleoside
  misc_feature (2)..(3): Phosphorothioate linkage
  modified_base (3)..(3): 2' fluoro-modified nucleoside
  modified_base (4)..(4): 2' O-methyl modified nucleoside
  modified_base (5)..(5): 2' fluoro-modified nucleoside
  modified_base (6)..(6): 2' O-methyl modified nucleoside
  modified_base (7)..(7): 2' fluoro-modified nucleoside
  modified_base (8)..(8): 2' fluoro-modified nucleoside
  modified_base (9)..(9): 2' fluoro-modified nucleoside
  modified_base (10)..(10): 2' O-methyl modified nucleoside
  modified_base (11)..(11): 2' fluoro-modified nucleoside
  modified_base (12)..(12): 2' O-methyl modified nucleoside
  modified_base (13)..(13): 2' fluoro-modified nucleoside
  modified_base (14)..(14): 2' O-methyl modified nucleoside
  modified_base (15)..(15): 2' fluoro-modified nucleoside
  modified_base (16)..(16): 2' O-methyl modified nucleoside
  modified_base (17)..(17): 2' fluoro-modified nucleoside
  modified_base (18)..(18): 2' O-methyl modified nucleoside
  modified_base (19)..(19): 2' fluoro-modified nucleoside
  misc_feature (19)..(20): Phosphorothioate linkage
  modified_base (20)..(20): 2' O-methyl modified nucleoside
  misc_feature (20)..(21): Phosphorothioate linkage
  modified_base (21)..(21): 2' O-methyl modified nucleoside
gagugaaagcguaagguuauu

SEQ ID NO: 11103 - RNA, 21 nt, Artificial Sequence
  Description of Artificial Sequence: Synthetic oligonucleotide
  modified_base (1)..(1): 2' fluoro-modified nucleoside
  misc_feature (1)..(2): Phosphorothioate linkage
  modified_base (2)..(2): 2' O-methyl modified nucleoside
  misc_feature (2)..(3): Phosphorothioate linkage
  modified_base (3)..(3): 2' fluoro-modified nucleoside
  modified_base (4)..(4): 2' O-methyl modified nucleoside
  modified_base (5)..(5): 2' fluoro-modified nucleoside
  modified_base (6)..(6): 2' O-methyl modified nucleoside
  modified_base (7)..(7): 2' fluoro-modified nucleoside
  modified_base (8)..(8): 2' fluoro-modified nucleoside
  modified_base (9)..(9): 2' fluoro-modified nucleoside
  modified_base (10)..(10): 2' O-methyl modified nucleoside
  modified_base (11)..(11): 2' fluoro-modified nucleoside
  modified_base (12)..(12): 2' O-methyl modified nucleoside
  modified_base (13)..(13): 2' fluoro-modified nucleoside
  modified_base (14)..(14): 2' O-methyl modified nucleoside
  modified_base (15)..(15): 2' fluoro-modified nucleoside
  modified_base (16)..(16): 2' O-methyl modified nucleoside
  modified_base (17)..(17): 2' fluoro-modified nucleoside
  modified_base (18)..(18): 2' O-methyl modified nucleoside
  modified_base (19)..(19): 2' fluoro-modified nucleoside
  misc_feature (19)..(20): Phosphorothioate linkage
  modified_base (20)..(20): 2' O-methyl modified nucleoside
  misc_feature (20)..(21): Phosphorothioate linkage
  modified_base (21)..(21): 2' O-methyl modified nucleoside
agugaaagcguaagguucauu

SEQ ID NO: 11104 - RNA, 21 nt, Artificial Sequence
  Description of Artificial Sequence: Synthetic oligonucleotide
  modified_base (1)..(1): 2' fluoro-modified nucleoside
  misc_feature (1)..(2): Phosphorothioate linkage
  modified_base (2)..(2): 2' O-methyl modified nucleoside
  misc_feature (2)..(3): Phosphorothioate linkage
  modified_base (3)..(3): 2' fluoro-modified nucleoside
  modified_base (4)..(4): 2' O-methyl modified nucleoside
  modified_base (5)..(5): 2' fluoro-modified nucleoside
  modified_base (6)..(6): 2' O-methyl modified nucleoside
  modified_base (7)..(7): 2' fluoro-modified nucleoside
  modified_base (8)..(8): 2' fluoro-modified nucleoside
  modified_base (9)..(9): 2' fluoro-modified nucleoside
  modified_base (10)..(10): 2' O-methyl modified nucleoside
  modified_base (11)..(11): 2' fluoro-modified nucleoside
  modified_base (12)..(12): 2' O-methyl modified nucleoside
  modified_base (13)..(13): 2' fluoro-modified nucleoside
  modified_base (14)..(14): 2' O-methyl modified nucleoside
  modified_base (15)..(15): 2' fluoro-modified nucleoside
  modified_base (16)..(16): 2' O-methyl modified nucleoside
  modified_base (17)..(17): 2' fluoro-modified nucleoside
  modified_base (18)..(18): 2' O-methyl modified nucleoside
  modified_base (19)..(19): 2' fluoro-modified nucleoside
  misc_feature (19)..(20): Phosphorothioate linkage
  modified_base (20)..(20): 2' O-methyl modified nucleoside
  misc_feature (20)..(21): Phosphorothioate linkage
  modified_base (21)..(21): 2' O-methyl modified nucleoside
gcguaagguucagucagcauu

SEQ ID NO: 11105 - RNA, 21 nt, Artificial Sequence
  Description of Artificial Sequence: Synthetic oligonucleotide
  modified_base (1)..(1): 2' fluoro-modified nucleoside
  misc_feature (1)..(2): Phosphorothioate linkage
  modified_base (2)..(2): 2' O-methyl modified nucleoside
  misc_feature (2)..(3): Phosphorothioate linkage
  modified_base (3)..(3): 2' fluoro-modified nucleoside
  modified_base (4)..(4): 2' O-methyl modified nucleoside
  modified_base (5)..(5): 2' fluoro-modified nucleoside
  modified_base (6)..(6): 2' O-methyl modified nucleoside
  modified_base (7)..(7): 2' fluoro-modified nucleoside
  modified_base (8)..(8): 2' fluoro-modified nucleoside
  modified_base (9)..(9): 2' fluoro-modified nucleoside
  modified_base (10)..(10): 2' O-methyl modified nucleoside
  modified_base (11)..(11): 2' fluoro-modified nucleoside
  modified_base (12)..(12): 2' O-methyl modified nucleoside
  modified_base (13)..(13): 2' fluoro-modified nucleoside
  modified_base (14)..(14): 2' O-methyl modified nucleoside
  modified_base (15)..(15): 2' fluoro-modified nucleoside
  modified_base (16)..(16): 2' O-methyl modified nucleoside
  modified_base (17)..(17): 2' fluoro-modified nucleoside
  modified_base (18)..(18): 2' O-methyl modified nucleoside
  modified_base (19)..(19): 2' fluoro-modified nucleoside
  misc_feature (19)..(20): Phosphorothioate linkage
  modified_base (20)..(20): 2' O-methyl modified nucleoside
  misc_feature (20)..(21): Phosphorothioate linkage
  modified_base (21)..(21): 2' O-methyl modified nucleoside
ucacccaaacccacaaaaauu

SEQ ID NO: 11106 - RNA, 21 nt, Artificial Sequence
  Description of Artificial Sequence: Synthetic oligonucleotide
  modified_base (1)..(1): 2' fluoro-modified nucleoside
  misc_feature (1)..(2): Phosphorothioate linkage
  modified_base (2)..(2): 2' O-methyl modified nucleoside
  misc_feature (2)..(3): Phosphorothioate linkage
  modified_base (3)..(3): 2' fluoro-modified nucleoside
  modified_base (4)..(4): 2' O-methyl modified nucleoside
  modified_base (5)..(5): 2' fluoro-modified nucleoside
  modified_base (6)..(6): 2' O-methyl modified nucleoside
  modified_base (7)..(7): 2' fluoro-modified nucleoside
  modified_base (8)..(8): 2' fluoro-modified nucleoside
  modified_base (9)..(9): 2' fluoro-modified nucleoside
  modified_base (10)..(10): 2' O-methyl modified nucleoside
  modified_base (11)..(11): 2' fluoro-modified nucleoside
  modified_base (12)..(12): 2' O-methyl modified nucleoside
  modified_base (13)..(13): 2' fluoro-modified nucleoside
  modified_base (14)..(14): 2' O-methyl modified nucleoside
  modified_base (15)..(15): 2' fluoro-modified nucleoside
  modified_base (16)..(16): 2' O-methyl modified nucleoside
  modified_base (17)..(17): 2' fluoro-modified nucleoside
  modified_base (18)..(18): 2' O-methyl modified nucleoside
  modified_base (19)..(19): 2' fluoro-modified nucleoside
  misc_feature (19)..(20): Phosphorothioate linkage
  modified_base (20)..(20): 2' O-methyl modified nucleoside
  misc_feature (20)..(21): Phosphorothioate linkage
  modified_base (21)..(21): 2' O-methyl modified nucleoside
ggcucugcauuuucaucgauu

SEQ ID NO: 11107 - RNA, 21 nt, Artificial Sequence
  Description of Artificial Sequence: Synthetic oligonucleotide
  modified_base (1)..(1): 2' fluoro-modified nucleoside
  misc_feature (1)..(2): Phosphorothioate linkage
  modified_base (2)..(2): 2' O-methyl modified nucleoside
  misc_feature (2)..(3): Phosphorothioate linkage
  modified_base (3)..(3): 2' fluoro-modified nucleoside
  modified_base (4)..(4): 2' O-methyl modified nucleoside
  modified_base (5)..(5): 2' fluoro-modified nucleoside
  modified_base (6)..(6): 2' O-methyl modified nucleoside
  modified_base (7)..(7): 2' fluoro-modified nucleoside
  modified_base (8)..(8): 2' fluoro-modified nucleoside
  modified_base (9)..(9): 2' fluoro-modified nucleoside
  modified_base (10)..(10): 2' O-methyl modified nucleoside
  modified_base (11)..(11): 2' fluoro-modified nucleoside
  modified_base (12)..(12): 2' O-methyl modified nucleoside
  modified_base (13)..(13): 2' fluoro-modified nucleoside
  modified_base (14)..(14): 2' O-methyl modified nucleoside
  modified_base (15)..(15): 2' fluoro-modified nucleoside
  modified_base (16)..(16): 2' O-methyl modified nucleoside
  modified_base (17)..(17): 2' fluoro-modified nucleoside
  modified_base (18)..(18): 2' O-methyl modified nucleoside
  modified_base (19)..(19): 2' fluoro-modified nucleoside
  misc_feature (19)..(20): Phosphorothioate linkage
  modified_base (20)..(20): 2' O-methyl modified nucleoside
  misc_feature (20)..(21): Phosphorothioate linkage
  modified_base (21)..(21): 2' O-methyl modified nucleoside
aucguggccuuugucagcauu

SEQ ID NO: 11108 - RNA, 21 nt, Artificial Sequence
  Description of Artificial Sequence: Synthetic oligonucleotide
  modified_base (1)..(1): 2' fluoro-modified nucleoside
  misc_feature (1)..(2): Phosphorothioate linkage
  modified_base (2)..(2): 2' O-methyl modified nucleoside
  misc_feature (2)..(3): Phosphorothioate linkage
  modified_base (3)..(3): 2' fluoro-modified nucleoside
  modified_base (4)..(4): 2' O-methyl modified nucleoside
  modified_base (5)..(5): 2' fluoro-modified nucleoside
  modified_base (6)..(6): 2' O-methyl modified nucleoside
  modified_base (7)..(7): 2' fluoro-modified nucleoside
  modified_base (8)..(8): 2' fluoro-modified nucleoside
  modified_base (9)..(9): 2' fluoro-modified nucleoside
  modified_base (10)..(10): 2' O-methyl modified nucleoside
  modified_base (11)..(11): 2' fluoro-modified nucleoside
  modified_base (12)..(12): 2' O-methyl modified nucleoside
  modified_base (13)..(13): 2' fluoro-modified nucleoside
  modified_base (14)..(14): 2' O-methyl modified nucleoside
  modified_base (15)..(15): 2' fluoro-modified nucleoside
  modified_base (16)..(16): 2' O-methyl modified nucleoside
  modified_base (17)..(17): 2' fluoro-modified nucleoside
  modified_base (18)..(18): 2' O-methyl modified nucleoside
  modified_base (19)..(19): 2' fluoro-modified nucleoside
  misc_feature (19)..(20): Phosphorothioate linkage
  modified_base (20)..(20): 2' O-methyl modified nucleoside
  misc_feature (20)..(21): Phosphorothioate linkage
  modified_base (21)..(21): 2' O-methyl modified nucleoside
ucguggccuuugucagccauu

SEQ ID NO: 11109 - RNA, 21 nt, Artificial Sequence
  Description of Artificial Sequence: Synthetic oligonucleotide
  modified_base (1)..(1): 2' fluoro-modified nucleoside
  misc_feature (1)..(2): Phosphorothioate linkage
  modified_base (2)..(2): 2' O-methyl modified nucleoside
  misc_feature (2)..(3): Phosphorothioate linkage
  modified_base (3)..(3): 2' fluoro-modified nucleoside
  modified_base (4)..(4): 2' O-methyl modified nucleoside
  modified_base (5)..(5): 2' fluoro-modified nucleoside
  modified_base (6)..(6): 2' O-methyl modified nucleoside
  modified_base (7)..(7): 2' fluoro-modified nucleoside
  modified_base (8)..(8): 2' fluoro-modified nucleoside
  modified_base (9)..(9): 2' fluoro-modified nucleoside
  modified_base (10)..(10): 2' O-methyl modified nucleoside
  modified_base (11)..(11): 2' fluoro-modified nucleoside
  modified_base (12)..(12): 2' O-methyl modified nucleoside
  modified_base (13)..(13): 2' fluoro-modified nucleoside
  modified_base (14)..(14): 2' O-methyl modified nucleoside
  modified_base (15)..(15): 2' fluoro-modified nucleoside
  modified_base (16)..(16): 2' O-methyl modified nucleoside
  modified_base (17)..(17): 2' fluoro-modified nucleoside
  modified_base (18)..(18): 2' O-methyl modified nucleoside
  modified_base (19)..(19): 2' fluoro-modified nucleoside
  misc_feature (19)..(20): Phosphorothioate linkage
  modified_base (20)..(20): 2' O-methyl modified nucleoside
  misc_feature (20)..(21): Phosphorothioate linkage
  modified_base (21)..(21): 2' O-methyl modified nucleoside
gcaagcgcauggagucgcauu

SEQ ID NO: 11110 - RNA, 21 nt, Artificial Sequence
  Description of Artificial Sequence: Synthetic oligonucleotide
  modified_base (1)..(1): 2' fluoro-modified nucleoside
  misc_feature (1)..(2): Phosphorothioate linkage
  modified_base (2)..(2): 2' O-methyl modified nucleoside
  misc_feature (2)..(3): Phosphorothioate linkage
  modified_base (3)..(3): 2' fluoro-modified nucleoside
  modified_base (4)..(4): 2' O-methyl modified nucleoside
  modified_base (5)..(5): 2' fluoro-modified nucleoside
  modified_base (6)..(6): 2' O-methyl modified nucleoside
  modified_base (7)..(7): 2' fluoro-modified nucleoside
  modified_base (8)..(8): 2' fluoro-modified nucleoside
  modified_base (9)..(9): 2' fluoro-modified nucleoside
  modified_base (10)..(10): 2' O-methyl modified nucleoside
  modified_base (11)..(11): 2' fluoro-modified nucleoside
  modified_base (12)..(12): 2' O-methyl modified nucleoside
  modified_base (13)..(13): 2' fluoro-modified nucleoside
  modified_base (14)..(14): 2' O-methyl modified nucleoside
  modified_base (15)..(15): 2' fluoro-modified nucleoside
  modified_base (16)..(16): 2' O-methyl modified nucleoside
  modified_base (17)..(17): 2' fluoro-modified nucleoside
  modified_base (18)..(18): 2' O-methyl modified nucleoside
  modified_base (19)..(19): 2' fluoro-modified nucleoside
  misc_feature (19)..(20): Phosphorothioate linkage
  modified_base (20)..(20): 2' O-methyl modified nucleoside
  misc_feature (20)..(21): Phosphorothioate linkage
  modified_base (21)..(21): 2' O-methyl modified nucleoside
caagcgcauggagucgcgauu

SEQ ID NO: 11111 - RNA, 21 nt, Artificial Sequence
  Description of Artificial Sequence: Synthetic oligonucleotide
  modified_base (1)..(1): 2' fluoro-modified nucleoside
  misc_feature (1)..(2): Phosphorothioate linkage
  modified_base (2)..(2): 2' O-methyl modified nucleoside
  misc_feature (2)..(3): Phosphorothioate linkage
  modified_base (3)..(3): 2' fluoro-modified nucleoside
  modified_base (4)..(4): 2' O-methyl modified nucleoside
  modified_base (5)..(5): 2' fluoro-modified nucleoside
  modified_base (6)..(6): 2' O-methyl modified nucleoside
  modified_base (7)..(7): 2' fluoro-modified nucleoside
  modified_base (8)..(8): 2' fluoro-modified nucleoside
  modified_base (9)..(9): 2' fluoro-modified nucleoside
  modified_base (10)..(10): 2' O-methyl modified nucleoside
  modified_base (11)..(11): 2' fluoro-modified nucleoside
  modified_base (12)..(12): 2' O-methyl modified nucleoside
  modified_base (13)..(13): 2' fluoro-modified nucleoside
  modified_base (14)..(14): 2' O-methyl modified nucleoside
  modified_base (15)..(15): 2' fluoro-modified nucleoside
  modified_base (16)..(16): 2' O-methyl modified nucleoside
  modified_base (17)..(17): 2' fluoro-modified nucleoside
  modified_base (18)..(18): 2' O-methyl modified nucleoside
  modified_base (19)..(19): 2' fluoro-modified nucleoside
  misc_feature (19)..(20): Phosphorothioate linkage
  modified_base (20)..(20): 2' O-methyl modified nucleoside
  misc_feature (20)..(21): Phosphorothioate linkage
  modified_base (21)..(21): 2' O-methyl modified nucleoside
aagcgcauggagucgcggauu

SEQ ID NO: 11112 - RNA, 21 nt, Artificial Sequence
  Description of Artificial Sequence: Synthetic oligonucleotide
  modified_base (1)..(1): 2' fluoro-modified nucleoside
  misc_feature (1)..(2): Phosphorothioate linkage
  modified_base (2)..(2): 2' O-methyl modified nucleoside
  misc_feature (2)..(3): Phosphorothioate linkage
  modified_base (3)..(3): 2' fluoro-modified nucleoside
  modified_base (4)..(4): 2' O-methyl modified nucleoside
  modified_base (5)..(5): 2' fluoro-modified nucleoside
  modified_base (6)..(6): 2' O-methyl modified nucleoside
  modified_base (7)..(7): 2' fluoro-modified nucleoside
  modified_base (8)..(8): 2' fluoro-modified nucleoside
  modified_base (9)..(9): 2' fluoro-modified nucleoside
  modified_base (10)..(10): 2' O-methyl modified nucleoside
  modified_base (11)..(11): 2' fluoro-modified nucleoside
  modified_base (12)..(12): 2' O-methyl modified nucleoside
  modified_base (13)..(13): 2' fluoro-modified nucleoside
  modified_base (14)..(14): 2' O-methyl modified nucleoside
  modified_base (15)..(15): 2' fluoro-modified nucleoside
  modified_base (16)..(16): 2' O-methyl modified nucleoside
  modified_base (17)..(17): 2' fluoro-modified nucleoside
  modified_base (18)..(18): 2' O-methyl modified nucleoside
  modified_base (19)..(19): 2' fluoro-modified nucleoside
  misc_feature (19)..(20): Phosphorothioate linkage
  modified_base (20)..(20): 2' O-methyl modified nucleoside
  misc_feature (20)..(21): Phosphorothioate linkage
  modified_base (21)..(21): 2' O-methyl modified nucleoside
ggagucgcggcucacagaauu

SEQ ID NO: 11113 - RNA, 21 nt, Artificial Sequence
  Description of Artificial Sequence: Synthetic oligonucleotide
  modified_base (1)..(1): 2' fluoro-modified nucleoside
  misc_feature (1)..(2): Phosphorothioate linkage
  modified_base (2)..(2): 2' O-methyl modified nucleoside
  misc_feature (2)..(3): Phosphorothioate linkage
  modified_base (3)..(3): 2' fluoro-modified nucleoside
  modified_base (4)..(4): 2' O-methyl modified nucleoside
  modified_base (5)..(5): 2' fluoro-modified nucleoside
  modified_base (6)..(6): 2' O-methyl modified nucleoside
  modified_base (7)..(7): 2' fluoro-modified nucleoside
  modified_base (8)..(8): 2' fluoro-modified nucleoside
  modified_base (9)..(9): 2' fluoro-modified nucleoside
  modified_base (10)..(10): 2' O-methyl modified nucleoside
  modified_base (11)..(11): 2' fluoro-modified nucleoside
  modified_base (12)..(12): 2' O-methyl modified nucleoside
  modified_base (13)..(13): 2' fluoro-modified nucleoside
  modified_base (14)..(14): 2' O-methyl modified nucleoside
  modified_base (15)..(15): 2' fluoro-modified nucleoside
  modified_base (16)..(16): 2' O-methyl modified nucleoside
  modified_base (17)..(17): 2' fluoro-modified nucleoside
  modified_base (18)..(18): 2' O-methyl modified nucleoside
  modified_base (19)..(19): 2' fluoro-modified nucleoside
  misc_feature (19)..(20): Phosphorothioate linkage
  modified_base (20)..(20): 2' O-methyl modified nucleoside
  misc_feature (20)..(21): Phosphorothioate linkage
  modified_base (21)..(21): 2' O-methyl modified nucleoside
gagucgcggcucacagauauu

SEQ ID NO: 11114 - RNA, 21 nt, Artificial Sequence
  Description of Artificial Sequence: Synthetic oligonucleotide
  modified_base (1)..(1): 2' fluoro-modified nucleoside
  misc_feature (1)..(2): Phosphorothioate linkage
  modified_base (2)..(2): 2' O-methyl modified nucleoside
  misc_feature (2)..(3): Phosphorothioate linkage
  modified_base (3)..(3): 2' fluoro-modified nucleoside
  modified_base (4)..(4): 2' O-methyl modified nucleoside
  modified_base (5)..(5): 2' fluoro-modified nucleoside
  modified_base (6)..(6): 2' O-methyl modified nucleoside
  modified_base (7)..(7): 2' fluoro-modified nucleoside
  modified_base (8)..(8): 2' fluoro-modified nucleoside
  modified_base (9)..(9): 2' fluoro-modified nucleoside
  modified_base (10)..(10): 2' O-methyl modified nucleoside
  modified_base (11)..(11): 2' fluoro-modified nucleoside
  modified_base (12)..(12): 2' O-methyl modified nucleoside
  modified_base (13)..(13): 2' fluoro-modified nucleoside
  modified_base (14)..(14): 2' O-methyl modified nucleoside
  modified_base (15)..(15): 2' fluoro-modified nucleoside
  modified_base (16)..(16): 2' O-methyl modified nucleoside
  modified_base (17)..(17): 2' fluoro-modified nucleoside
  modified_base (18)..(18): 2' O-methyl modified nucleoside
  modified_base (19)..(19): 2' fluoro-modified nucleoside
  misc_feature (19)..(20): Phosphorothioate linkage
  modified_base (20)..(20): 2' O-methyl modified nucleoside
  misc_feature (20)..(21): Phosphorothioate linkage
  modified_base (21)..(21): 2' O-methyl modified nucleoside
gucgcggcucacagaugcauu

SEQ ID NO: 11115 - RNA, 21 nt, Artificial Sequence
  Description of Artificial Sequence: Synthetic oligonucleotide
  modified_base (1)..(1): 2' fluoro-modified nucleoside
  misc_feature (1)..(2): Phosphorothioate linkage
  modified_base (2)..(2): 2' O-methyl modified nucleoside
  misc_feature (2)..(3): Phosphorothioate linkage
  modified_base (3)..(3): 2' fluoro-modified nucleoside
  modified_base (4)..(4): 2' O-methyl modified nucleoside
  modified_base (5)..(5): 2' fluoro-modified nucleoside
  modified_base (6)..(6): 2' O-methyl modified nucleoside
  modified_base (7)..(7): 2' fluoro-modified nucleoside
  modified_base (8)..(8): 2' fluoro-modified nucleoside
  modified_base (9)..(9): 2' fluoro-modified nucleoside
  modified_base (10)..(10): 2' O-methyl modified nucleoside
  modified_base (11)..(11): 2' fluoro-modified nucleoside
  modified_base (12)..(12): 2' O-methyl modified nucleoside
  modified_base (13)..(13): 2' fluoro-modified nucleoside
  modified_base (14)..(14): 2' O-methyl modified nucleoside
  modified_base (15)..(15): 2' fluoro-modified nucleoside
  modified_base (16)..(16): 2' O-methyl modified nucleoside
  modified_base (17)..(17): 2' fluoro-modified nucleoside
  modified_base (18)..(18): 2' O-methyl modified nucleoside
  modified_base (19)..(19): 2' fluoro-modified nucleoside
  misc_feature (19)..(20): Phosphorothioate linkage
  modified_base (20)..(20): 2' O-methyl modified nucleoside
  misc_feature (20)..(21): Phosphorothioate linkage
  modified_base (21)..(21): 2' O-methyl modified nucleoside
gacggucacucagaccucauu

SEQ ID NO: 11116 - RNA, 21 nt, Artificial Sequence
  Description of Artificial Sequence: Synthetic oligonucleotide
  modified_base (1)..(1): 2' fluoro-modified nucleoside
  misc_feature (1)..(2): Phosphorothioate linkage
  modified_base (2)..(2): 2' O-methyl modified nucleoside
  misc_feature (2)..(3): Phosphorothioate linkage
  modified_base (3)..(3): 2' fluoro-modified nucleoside
  modified_base (4)..(4): 2' O-methyl modified nucleoside
  modified_base (5)..(5): 2' fluoro-modified nucleoside
  modified_base (6)..(6): 2' O-methyl modified nucleoside
  modified_base (7)..(7): 2' fluoro-modified nucleoside
  modified_base (8)..(8): 2' fluoro-modified nucleoside
  modified_base (9)..(9): 2' fluoro-modified nucleoside
  modified_base (10)..(10): 2' O-methyl modified nucleoside
  modified_base (11)..(11): 2' fluoro-modified nucleoside
  modified_base (12)..(12): 2' O-methyl modified nucleoside
  modified_base (13)..(13): 2' fluoro-modified nucleoside
  modified_base (14)..(14): 2' O-methyl modified nucleoside
  modified_base (15)..(15): 2' fluoro-modified nucleoside
  modified_base (16)..(16): 2' O-methyl modified nucleoside
  modified_base (17)..(17): 2' fluoro-modified nucleoside
  modified_base (18)..(18): 2' O-methyl modified nucleoside
  modified_base (19)..(19): 2' fluoro-modified nucleoside
  misc_feature (19)..(20): Phosphorothioate linkage
  modified_base (20)..(20): 2' O-methyl modified nucleoside
  misc_feature (20)..(21): Phosphorothioate linkage
  modified_base (21)..(21): 2' O-methyl modified nucleoside
cucagaccuccgcagaugauu

SEQ ID NO: 11117 - RNA, 21 nt, Artificial Sequence
  Description of Artificial Sequence: Synthetic oligonucleotide
  modified_base (1)..(1): 2' fluoro-modified nucleoside
  misc_feature (1)..(2): Phosphorothioate linkage
  modified_base (2)..(2): 2' O-methyl modified nucleoside
  misc_feature (2)..(3): Phosphorothioate linkage
  modified_base (3)..(3): 2' fluoro-modified nucleoside
  modified_base (4)..(4): 2' O-methyl modified nucleoside
  modified_base (5)..(5): 2' fluoro-modified nucleoside
  modified_base (6)..(6): 2' O-methyl modified nucleoside
  modified_base (7)..(7): 2' fluoro-modified nucleoside
  modified_base (8)..(8): 2' fluoro-modified nucleoside
  modified_base (9)..(9): 2' fluoro-modified nucleoside
  modified_base (10)..(10): 2' O-methyl modified nucleoside
  modified_base (11)..(11): 2' fluoro-modified nucleoside
  modified_base (12)..(12): 2' O-methyl modified nucleoside
  modified_base (13)..(13): 2' fluoro-modified nucleoside
  modified_base (14)..(14): 2' O-methyl modified nucleoside
  modified_base (15)..(15): 2' fluoro-modified nucleoside
  modified_base (16)..(16): 2' O-methyl modified nucleoside
  modified_base (17)..(17): 2' fluoro-modified nucleoside
  modified_base (18)..(18): 2' O-methyl modified nucleoside
  modified_base (19)..(19): 2' fluoro-modified nucleoside
  misc_feature (19)..(20): Phosphorothioate linkage
  modified_base (20)..(20): 2' O-methyl modified nucleoside
  misc_feature (20)..(21): Phosphorothioate linkage
  modified_base (21)..(21): 2' O-methyl modified nucleoside
ucagaccuccgcagaugcauu

SEQ ID NO: 11118 - RNA, 21 nt, Artificial Sequence
  Description of Artificial Sequence: Synthetic oligonucleotide
  modified_base (1)..(1): 2' fluoro-modified nucleoside
  misc_feature (1)..(2): Phosphorothioate linkage
  modified_base (2)..(2): 2' O-methyl modified nucleoside
  misc_feature (2)..(3): Phosphorothioate linkage
  modified_base (3)..(3): 2' fluoro-modified nucleoside
  modified_base (4)..(4): 2' O-methyl modified nucleoside
  modified_base (5)..(5): 2' fluoro-modified nucleoside
  modified_base (6)..(6): 2' O-methyl modified nucleoside
  modified_base (7)..(7): 2' fluoro-modified nucleoside
  modified_base (8)..(8): 2' fluoro-modified nucleoside
  modified_base (9)..(9): 2' fluoro-modified nucleoside
  modified_base (10)..(10): 2' O-methyl modified nucleoside
  modified_base (11)..(11): 2' fluoro-modified nucleoside
  modified_base (12)..(12): 2' O-methyl modified nucleoside
  modified_base (13)..(13): 2' fluoro-modified nucleoside
  modified_base (14)..(14): 2' O-methyl modified nucleoside
  modified_base (15)..(15): 2' fluoro-modified nucleoside
  modified_base (16)..(16): 2' O-methyl modified nucleoside
  modified_base (17)..(17): 2' fluoro-modified nucleoside
  modified_base (18)..(18): 2' O-methyl modified nucleoside
  modified_base (19)..(19): 2' fluoro-modified nucleoside
  misc_feature (19)..(20): Phosphorothioate linkage
  modified_base (20)..(20): 2' O-methyl modified nucleoside
  misc_feature (20)..(21): Phosphorothioate linkage
  modified_base (21)..(21): 2' O-methyl modified nucleoside
ccuccgcagaugccaucuauu

SEQ ID NO: 11119 - RNA, 21 nt, Artificial Sequence
  Description of Artificial Sequence: Synthetic oligonucleotide
  modified_base (1)..(1): 2' fluoro-modified nucleoside
  misc_feature (1)..(2): Phosphorothioate linkage
  modified_base (2)..(2): 2' O-methyl modified nucleoside
  misc_feature (2)..(3): Phosphorothioate linkage
  modified_base (3)..(3): 2' fluoro-modified nucleoside
  modified_base (4)..(4): 2' O-methyl modified nucleoside
  modified_base (5)..(5): 2' fluoro-modified nucleoside
  modified_base (6)..(6): 2' O-methyl modified nucleoside
  modified_base (7)..(7): 2' fluoro-modified nucleoside
  modified_base (8)..(8): 2' fluoro-modified nucleoside
  modified_base (9)..(9): 2' fluoro-modified nucleoside
  modified_base (10)..(10): 2' O-methyl modified nucleoside
  modified_base (11)..(11): 2' fluoro-modified nucleoside
  modified_base (12)..(12): 2' O-methyl modified nucleoside
  modified_base (13)..(13): 2' fluoro-modified nucleoside
  modified_base (14)..(14): 2' O-methyl modified nucleoside
  modified_base (15)..(15): 2' fluoro-modified nucleoside
  modified_base (16)..(16): 2' O-methyl modified nucleoside
  modified_base (17)..(17): 2' fluoro-modified nucleoside
  modified_base (18)..(18): 2' O-methyl modified nucleoside
  modified_base (19)..(19): 2' fluoro-modified nucleoside
  misc_feature (19)..(20): Phosphorothioate linkage
  modified_base (20)..(20): 2' O-methyl modified nucleoside
  misc_feature (20)..(21): Phosphorothioate linkage
  modified_base (21)..(21): 2' O-methyl modified nucleoside
cuccgcagaugccaucuaauu

SEQ ID NO: 11120 - RNA, 21 nt, Artificial Sequence
  Description of Artificial Sequence: Synthetic oligonucleotide
  modified_base (1)..(1): 2' fluoro-modified nucleoside
  misc_feature (1)..(2): Phosphorothioate linkage
  modified_base (2)..(2): 2' O-methyl modified nucleoside
  misc_feature (2)..(3): Phosphorothioate linkage
  modified_base (3)..(3): 2' fluoro-modified nucleoside
  modified_base (4)..(4): 2' O-methyl modified nucleoside
  modified_base (5)..(5): 2' fluoro-modified nucleoside
  modified_base (6)..(6): 2' O-methyl modified nucleoside
  modified_base (7)..(7): 2' fluoro-modified nucleoside
  modified_base (8)..(8): 2' fluoro-modified nucleoside
  modified_base (9)..(9): 2' fluoro-modified nucleoside
  modified_base (10)..(10): 2' O-methyl modified nucleoside
  modified_base (11)..(11): 2' fluoro-modified nucleoside
  modified_base (12)..(12): 2' O-methyl modified nucleoside
  modified_base (13)..(13): 2' fluoro-modified nucleoside
  modified_base (14)..(14): 2' O-methyl modified nucleoside
  modified_base (15)..(15): 2' fluoro-modified nucleoside
  modified_base (16)..(16): 2' O-methyl modified nucleoside
  modified_base (17)..(17): 2' fluoro-modified nucleoside
  modified_base (18)..(18): 2' O-methyl modified nucleoside
  modified_base (19)..(19): 2' fluoro-modified nucleoside
  misc_feature (19)..(20): Phosphorothioate linkage
  modified_base (20)..(20): 2' O-methyl modified nucleoside
  misc_feature (20)..(21): Phosphorothioate linkage
  modified_base (21)..(21): 2' O-methyl modified nucleoside
ccgcagaugccaucuacgauu

SEQ ID NO: 11121 - RNA, 21 nt, Artificial Sequence
  Description of Artificial Sequence: Synthetic oligonucleotide
  modified_base (1)..(1): 2' fluoro-modified nucleoside
  misc_feature (1)..(2): Phosphorothioate linkage
  modified_base (2)..(2): 2' O-methyl modified nucleoside
  misc_feature (2)..(3): Phosphorothioate linkage
  modified_base (3)..(3): 2' fluoro-modified nucleoside
  modified_base (4)..(4): 2' O-methyl modified nucleoside
  modified_base (5)..(5): 2' fluoro-modified nucleoside
  modified_base (6)..(6): 2' O-methyl modified nucleoside
  modified_base (7)..(7): 2' fluoro-modified nucleoside
  modified_base (8)..(8): 2' fluoro-modified nucleoside
  modified_base (9)..(9): 2' fluoro-modified nucleoside
  modified_base (10)..(10): 2' O-methyl modified nucleoside
  modified_base (11)..(11): 2' fluoro-modified nucleoside
  modified_base (12)..(12): 2' O-methyl modified nucleoside
  modified_base (13)..(13): 2' fluoro-modified nucleoside
  modified_base (14)..(14): 2' O-methyl modified nucleoside
  modified_base (15)..(15): 2' fluoro-modified nucleoside
  modified_base (16)..(16): 2' O-methyl modified nucleoside
  modified_base (17)..(17): 2' fluoro-modified nucleoside
  modified_base (18)..(18): 2' O-methyl modified nucleoside
  modified_base (19)..(19): 2' fluoro-modified nucleoside
  misc_feature (19)..(20): Phosphorothioate linkage
  modified_base (20)..(20): 2' O-methyl modified nucleoside
  misc_feature (20)..(21): Phosphorothioate linkage
  modified_base (21)..(21): 2' O-methyl modified nucleoside
agaugccaucuacgacugauu

SEQ ID NO: 11122 - RNA, 21 nt, Artificial Sequence
  Description of Artificial Sequence: Synthetic oligonucleotide
  modified_base (1)..(1): 2' fluoro-modified nucleoside
  misc_feature (1)..(2): Phosphorothioate linkage
  modified_base (2)..(2): 2' O-methyl modified nucleoside
  misc_feature (2)..(3): Phosphorothioate linkage
  modified_base (3)..(3): 2' fluoro-modified nucleoside
  modified_base (4)..(4): 2' O-methyl modified nucleoside
  modified_base (5)..(5): 2' fluoro-modified nucleoside
  modified_base (6)..(6): 2' O-methyl modified nucleoside
  modified_base (7)..(7): 2' fluoro-modified nucleoside
  modified_base (8)..(8): 2' fluoro-modified nucleoside
  modified_base (9)..(9): 2' fluoro-modified nucleoside
  modified_base (10)..(10): 2' O-methyl modified nucleoside
  modified_base (11)..(11): 2' fluoro-modified nucleoside
  modified_base (12)..(12): 2' O-methyl modified nucleoside
  modified_base (13)..(13): 2' fluoro-modified nucleoside
  modified_base (14)..(14): 2' O-methyl modified nucleoside
  modified_base (15)..(15): 2' fluoro-modified nucleoside
  modified_base (16)..(16): 2' O-methyl modified nucleoside
  modified_base (17)..(17): 2' fluoro-modified nucleoside
  modified_base (18)..(18): 2' O-methyl modified nucleoside
  modified_base (19)..(19): 2' fluoro-modified nucleoside
  misc_feature (19)..(20): Phosphorothioate linkage
  modified_base (20)..(20): 2' O-methyl modified nucleoside
  misc_feature (20)..(21): Phosphorothioate linkage
  modified_base (21)..(21): 2' O-methyl modified nucleoside
gaugccaucuacgacugcauu

SEQ ID NO: 11123 - RNA, 21 nt, Artificial Sequence
  Description of Artificial Sequence: Synthetic oligonucleotide
  modified_base (1)..(1): 2' fluoro-modified nucleoside
  misc_feature (1)..(2): Phosphorothioate linkage
  modified_base (2)..(2): 2' O-methyl modified nucleoside
  misc_feature (2)..(3): Phosphorothioate linkage
  modified_base (3)..(3): 2' fluoro-modified nucleoside
  modified_base (4)..(4): 2' O-methyl modified nucleoside
  modified_base (5)..(5): 2' fluoro-modified nucleoside
  modified_base (6)..(6): 2' O-methyl modified nucleoside
  modified_base (7)..(7): 2' fluoro-modified nucleoside
  modified_base (8)..(8): 2' fluoro-modified nucleoside
  modified_base (9)..(9): 2' fluoro-modified nucleoside
  modified_base (10)..(10): 2' O-methyl modified nucleoside
  modified_base (11)..(11): 2' fluoro-modified nucleoside
  modified_base (12)..(12): 2' O-methyl modified nucleoside
  modified_base (13)..(13): 2' fluoro-modified nucleoside
  modified_base (14)..(14): 2' O-methyl modified nucleoside
  modified_base (15)..(15): 2' fluoro-modified nucleoside
  modified_base (16)..(16): 2' O-methyl modified nucleoside
  modified_base (17)..(17): 2' fluoro-modified nucleoside
  modified_base (18)..(18): 2' O-methyl modified nucleoside
  modified_base (19)..(19): 2' fluoro-modified nucleoside
  misc_feature (19)..(20): Phosphorothioate linkage
  modified_base (20)..(20): 2' O-methyl modified nucleoside
  misc_feature (20)..(21): Phosphorothioate linkage
  modified_base (21)..(21): 2' O-methyl modified nucleoside
ccaucuacgacugcucuuauu

SEQ ID NO: 11124 - RNA, 21 nt, Artificial Sequence
  Description of Artificial Sequence: Synthetic oligonucleotide
  modified_base (1)..(1): 2' fluoro-modified nucleoside
  misc_feature (1)..(2): Phosphorothioate linkage
  modified_base (2)..(2): 2' O-methyl modified nucleoside
  misc_feature (2)..(3): Phosphorothioate linkage
  modified_base (3)..(3): 2' fluoro-modified nucleoside
  modified_base (4)..(4): 2' O-methyl modified nucleoside
  modified_base (5)..(5): 2' fluoro-modified nucleoside
  modified_base (6)..(6): 2' O-methyl modified nucleoside
  modified_base (7)..(7): 2' fluoro-modified nucleoside
  modified_base (8)..(8): 2' fluoro-modified nucleoside
  modified_base (9)..(9): 2' fluoro-modified nucleoside
  modified_base (10)..(10): 2' O-methyl modified nucleoside
  modified_base (11)..(11): 2' fluoro-modified nucleoside
  modified_base (12)..(12): 2' O-methyl modified nucleoside
  modified_base (13)..(13): 2' fluoro-modified nucleoside
  modified_base (14)..(14): 2' O-methyl modified nucleoside
  modified_base (15)..(15): 2' fluoro-modified nucleoside
  modified_base (16)..(16): 2' O-methyl modified nucleoside
  modified_base (17)..(17): 2' fluoro-modified nucleoside
  modified_base (18)..(18): 2' O-methyl modified nucleoside
  modified_base (19)..(19): 2' fluoro-modified nucleoside
  misc_feature (19)..(20): Phosphorothioate linkage
  modified_base (20)..(20): 2' O-methyl modified nucleoside
  misc_feature (20)..(21): Phosphorothioate linkage
  modified_base (21)..(21): 2' O-methyl modified nucleoside
caucuacgacugcucuucauu

SEQ ID NO: 11125 - RNA, 21 nt, Artificial Sequence
  Description of Artificial Sequence: Synthetic oligonucleotide
  modified_base (1)..(1): 2' fluoro-modified nucleoside
  misc_feature (1)..(2): Phosphorothioate linkage
  modified_base (2)..(2): 2' O-methyl modified nucleoside
  misc_feature (2)..(3): Phosphorothioate linkage
  modified_base (3)..(3): 2' fluoro-modified nucleoside
  modified_base (4)..(4): 2' O-methyl modified nucleoside
  modified_base (5)..(5): 2' fluoro-modified nucleoside
  modified_base (6)..(6): 2' O-methyl modified nucleoside
  modified_base (7)..(7): 2' fluoro-modified nucleoside
  modified_base (8)..(8): 2' fluoro-modified nucleoside
  modified_base (9)..(9): 2' fluoro-modified nucleoside
  modified_base (10)..(10): 2' O-methyl modified nucleoside
  modified_base (11)..(11): 2' fluoro-modified nucleoside
  modified_base (12)..(12): 2' O-methyl modified nucleoside
  modified_base (13)..(13): 2' fluoro-modified nucleoside
  modified_base (14)..(14): 2' O-methyl modified nucleoside
  modified_base (15)..(15): 2' fluoro-modified nucleoside
  modified_base (16)..(16): 2' O-methyl modified nucleoside
  modified_base (17)..(17): 2' fluoro-modified nucleoside
  modified_base (18)..(18): 2' O-methyl modified nucleoside
  modified_base (19)..(19): 2' fluoro-modified nucleoside
  misc_feature (19)..(20): Phosphorothioate linkage
  modified_base (20)..(20): 2' O-methyl modified nucleoside
  misc_feature (20)..(21): Phosphorothioate linkage
  modified_base (21)..(21): 2' O-methyl modified nucleoside
accagaagaacuaccgcaauu

SEQ ID NO: 11126 - RNA, 21 nt, Artificial Sequence
  Description of Artificial Sequence: Synthetic oligonucleotide
  modified_base (1)..(1): 2' fluoro-modified nucleoside
  misc_feature (1)..(2): Phosphorothioate linkage
  modified_base (2)..(2): 2' O-methyl modified nucleoside
  misc_feature (2)..(3): Phosphorothioate linkage
  modified_base (3)..(3): 2' fluoro-modified nucleoside
  modified_base (4)..(4): 2' O-methyl modified nucleoside
  modified_base (5)..(5): 2' fluoro-modified nucleoside
  modified_base (6)..(6): 2' O-methyl modified nucleoside
  modified_base (7)..(7): 2' fluoro-modified nucleoside
  modified_base (8)..(8): 2' fluoro-modified nucleoside
  modified_base (9)..(9): 2' fluoro-modified nucleoside
  modified_base (10)..(10): 2' O-methyl modified nucleoside
  modified_base (11)..(11): 2' fluoro-modified nucleoside
  modified_base (12)..(12): 2' O-methyl modified nucleoside
  modified_base (13)..(13): 2' fluoro-modified nucleoside
  modified_base (14)..(14): 2' O-methyl modified nucleoside
  modified_base (15)..(15): 2' fluoro-modified nucleoside
  modified_base (16)..(16): 2' O-methyl modified nucleoside
  modified_base (17)..(17): 2' fluoro-modified nucleoside
  modified_base (18)..(18): 2' O-methyl modified nucleoside
  modified_base (19)..(19): 2' fluoro-modified nucleoside
  misc_feature (19)..(20): Phosphorothioate linkage
  modified_base (20)..(20): 2' O-methyl modified nucleoside
  misc_feature (20)..(21): Phosphorothioate linkage
  modified_base (21)..(21): 2' O-methyl modified nucleoside
ccagaagaacuaccgcauauu

SEQ ID NO: 11127 - RNA, 21 nt, Artificial Sequence
  Description of Artificial Sequence: Synthetic oligonucleotide
  modified_base (1)..(1): 2' fluoro-modified nucleoside
  misc_feature (1)..(2): Phosphorothioate linkage
  modified_base (2)..(2): 2' O-methyl modified nucleoside
  misc_feature (2)..(3): Phosphorothioate linkage
  modified_base (3)..(3): 2' fluoro-modified nucleoside
  modified_base (4)..(4): 2' O-methyl modified nucleoside
  modified_base (5)..(5): 2' fluoro-modified nucleoside
  modified_base (6)..(6): 2' O-methyl modified nucleoside
  modified_base (7)..(7): 2' fluoro-modified nucleoside
  modified_base (8)..(8): 2' fluoro-modified nucleoside
  modified_base (9)..(9): 2' fluoro-modified nucleoside
  modified_base (10)..(10): 2' O-methyl modified nucleoside
  modified_base (11)..(11): 2' fluoro-modified nucleoside
  modified_base (12)..(12): 2' O-methyl modified nucleoside
  modified_base (13)..(13): 2' fluoro-modified nucleoside
  modified_base (14)..(14): 2' O-methyl modified nucleoside
  modified_base (15)..(15): 2' fluoro-modified nucleoside
  modified_base (16)..(16): 2' O-methyl modified nucleoside
  modified_base (17)..(17): 2' fluoro-modified nucleoside
  modified_base (18)..(18): 2' O-methyl modified nucleoside
  modified_base (19)..(19): 2' fluoro-modified nucleoside
  misc_feature (19)..(20): Phosphorothioate linkage
  modified_base (20)..(20): 2' O-methyl modified nucleoside
  misc_feature (20)..(21): Phosphorothioate linkage
  modified_base (21)..(21): 2' O-methyl modified nucleoside
gaacuaccgcaucucuggauu

SEQ ID NO: 11128 - RNA, 21 nt, Artificial Sequence
  Description of Artificial Sequence: Synthetic oligonucleotide
  modified_base (1)..(1): 2' fluoro-modified nucleoside
  misc_feature (1)..(2): Phosphorothioate linkage
  modified_base (2)..(2): 2' O-methyl modified nucleoside
  misc_feature (2)..(3): Phosphorothioate linkage
  modified_base (3)..(3): 2' fluoro-modified nucleoside
  modified_base (4)..(4): 2' O-methyl modified nucleoside
  modified_base (5)..(5): 2' fluoro-modified nucleoside
  modified_base (6)..(6): 2' O-methyl modified nucleoside
  modified_base (7)..(7): 2' fluoro-modified nucleoside
  modified_base (8)..(8): 2' fluoro-modified nucleoside
  modified_base (9)..(9): 2' fluoro-modified nucleoside
  modified_base (10)..(10): 2' O-methyl modified nucleoside
  modified_base (11)..(11): 2' fluoro-modified nucleoside
  modified_base (12)..(12): 2' O-methyl modified nucleoside
  modified_base (13)..(13): 2' fluoro-modified nucleoside
  modified_base (14)..(14): 2' O-methyl modified nucleoside
  modified_base (15)..(15): 2' fluoro-modified nucleoside
  modified_base (16)..(16): 2' O-methyl modified nucleoside
  modified_base (17)..(17): 2' fluoro-modified nucleoside
  modified_base (18)..(18): 2' O-methyl modified nucleoside
  modified_base (19)..(19): 2' fluoro-modified nucleoside
  misc_feature (19)..(20): Phosphorothioate linkage
  modified_base (20)..(20): 2' O-methyl modified nucleoside
  misc_feature (20)..(21): Phosphorothioate linkage
  modified_base (21)..(21): 2' O-methyl modified nucleoside
ccgcaucucuggaguguaauu

SEQ ID NO: 11129 - RNA, 21 nt, Artificial Sequence
  Description of Artificial Sequence: Synthetic oligonucleotide
  modified_base (1)..(1): 2' fluoro-modified nucleoside
  misc_feature (1)..(2): Phosphorothioate linkage
  modified_base (2)..(2): 2' O-methyl modified nucleoside
  misc_feature (2)..(3): Phosphorothioate linkage
  modified_base (3)..(3): 2' fluoro-modified nucleoside
  modified_base (4)..(4): 2' O-methyl modified nucleoside
  modified_base (5)..(5): 2' fluoro-modified nucleoside
  modified_base (6)..(6): 2' O-methyl modified nucleoside
  modified_base (7)..(7): 2' fluoro-modified nucleoside
  modified_base (8)..(8): 2' fluoro-modified nucleoside
  modified_base (9)..(9): 2' fluoro-modified nucleoside
  modified_base (10)..(10): 2' O-methyl modified nucleoside
  modified_base (11)..(11): 2' fluoro-modified nucleoside
  modified_base (12)..(12): 2' O-methyl modified nucleoside
  modified_base (13)..(13): 2' fluoro-modified nucleoside
  modified_base (14)..(14): 2' O-methyl modified nucleoside
  modified_base (15)..(15): 2' fluoro-modified nucleoside
  modified_base (16)..(16): 2' O-methyl modified nucleoside
  modified_base (17)..(17): 2' fluoro-modified nucleoside
  modified_base (18)..(18): 2' O-methyl modified nucleoside
  modified_base (19)..(19): 2' fluoro-modified nucleoside
  misc_feature (19)..(20): Phosphorothioate linkage
  modified_base (20)..(20): 2' O-methyl modified nucleoside
  misc_feature (20)..(21): Phosphorothioate linkage
  modified_base (21)..(21): 2' O-methyl modified nucleoside
caucucuggaguguauaaauu

SEQ ID NO: 11130 - RNA, 21 nt, Artificial Sequence
  Description of Artificial Sequence: Synthetic oligonucleotide
  modified_base (1)..(1): 2' fluoro-modified nucleoside
  misc_feature (1)..(2): Phosphorothioate linkage
  modified_base (2)..(2): 2' O-methyl modified nucleoside
  misc_feature (2)..(3): Phosphorothioate linkage
  modified_base (3)..(3): 2' fluoro-modified nucleoside
  modified_base (4)..(4): 2' O-methyl modified nucleoside
  modified_base (5)..(5): 2' fluoro-modified nucleoside
  modified_base (6)..(6): 2' O-methyl modified nucleoside
  modified_base (7)..(7): 2' fluoro-modified nucleoside
  modified_base (8)..(8): 2' fluoro-modified nucleoside
  modified_base (9)..(9): 2' fluoro-modified nucleoside
  modified_base (10)..(10): 2' O-methyl modified nucleoside
  modified_base (11)..(11): 2' fluoro-modified nucleoside
  modified_base (12)..(12): 2' O-methyl modified nucleoside
  modified_base (13)..(13): 2' fluoro-modified nucleoside
  modified_base (14)..(14): 2' O-methyl modified nucleoside
  modified_base (15)..(15): 2' fluoro-modified nucleoside
  modified_base (16)..(16): 2' O-methyl modified nucleoside
  modified_base (17)..(17): 2' fluoro-modified nucleoside
  modified_base (18)..(18): 2' O-methyl modified nucleoside
  modified_base (19)..(19): 2' fluoro-modified nucleoside
  misc_feature (19)..(20): Phosphorothioate linkage
  modified_base (20)..(20): 2' O-methyl modified nucleoside
  misc_feature (20)..(21): Phosphorothioate linkage
  modified_base (21)..(21): 2' O-methyl modified nucleoside
aucucuggaguguauaagauu

SEQ ID NO: 11131 - RNA, 21 nt, Artificial Sequence
  Description of Artificial Sequence: Synthetic oligonucleotide
  modified_base (1)..(1): 2' fluoro-modified nucleoside
  misc_feature (1)..(2): Phosphorothioate linkage
  modified_base (2)..(2): 2' O-methyl modified nucleoside
  misc_feature (2)..(3): Phosphorothioate linkage
  modified_base (3)..(3): 2' fluoro-modified nucleoside
  modified_base (4)..(4): 2' O-methyl modified nucleoside
  modified_base (5)..(5): 2' fluoro-modified nucleoside
  modified_base (6)..(6): 2' O-methyl modified nucleoside
  modified_base (7)..(7): 2' fluoro-modified nucleoside
  modified_base (8)..(8): 2' fluoro-modified nucleoside
  modified_base (9)..(9): 2' fluoro-modified nucleoside
  modified_base (10)..(10): 2' O-methyl modified nucleoside
  modified_base (11)..(11): 2' fluoro-modified nucleoside
  modified_base (12)..(12): 2' O-methyl modified nucleoside
  modified_base (13)..(13): 2' fluoro-modified nucleoside
  modified_base (14)..(14): 2' O-methyl modified nucleoside
  modified_base (15)..(15): 2' fluoro-modified nucleoside
  modified_base (16)..(16): 2' O-methyl modified nucleoside
  modified_base (17)..(17): 2' fluoro-modified nucleoside
  modified_base (18)..(18): 2' O-methyl modified nucleoside
  modified_base (19)..(19): 2' fluoro-modified nucleoside
  misc_feature (19)..(20): Phosphorothioate linkage
  modified_base (20)..(20): 2' O-methyl modified nucleoside
  misc_feature (20)..(21): Phosphorothioate linkage
  modified_base (21)..(21): 2' O-methyl modified nucleoside
accaucauccagagacgaauu

SEQ ID NO: 11132 - RNA, 21 nt, Artificial Sequence
  Description of Artificial Sequence: Synthetic oligonucleotide
  modified_base (1)..(1): 2' fluoro-modified nucleoside
  misc_feature (1)..(2): Phosphorothioate linkage
  modified_base (2)..(2): 2' O-methyl modified nucleoside
  misc_feature (2)..(3): Phosphorothioate linkage
  modified_base (3)..(3): 2' fluoro-modified nucleoside
  modified_base (4)..(4): 2' O-methyl modified nucleoside
  modified_base (5)..(5): 2' fluoro-modified nucleoside
  modified_base (6)..(6): 2' O-methyl modified nucleoside
  modified_base (7)..(7): 2' fluoro-modified nucleoside
  modified_base (8)..(8): 2' fluoro-modified nucleoside
  modified_base (9)..(9): 2' fluoro-modified nucleoside
  modified_base (10)..(10): 2' O-methyl modified nucleoside
  modified_base (11)..(11): 2' fluoro-modified nucleoside
  modified_base (12)..(12): 2' O-methyl modified nucleoside
  modified_base (13)..(13): 2' fluoro-modified nucleoside
  modified_base (14)..(14): 2' O-methyl modified nucleoside
  modified_base (15)..(15): 2' fluoro-modified nucleoside
  modified_base (16)..(16): 2' O-methyl modified nucleoside
  modified_base (17)..(17): 2' fluoro-modified nucleoside
  modified_base (18)..(18): 2' O-methyl modified nucleoside
  modified_base (19)..(19): 2' fluoro-modified nucleoside
  misc_feature (19)..(20): Phosphorothioate linkage
  modified_base (20)..(20): 2' O-methyl modified nucleoside
  misc_feature (20)..(21): Phosphorothioate linkage
  modified_base (21)..(21): 2' O-methyl modified nucleoside
ccaucauccagagacgaaauu

SEQ ID NO: 11133 - RNA, 21 nt, Artificial Sequence
  Description of Artificial Sequence: Synthetic oligonucleotide
  modified_base (1)..(1): 2' fluoro-modified nucleoside
  misc_feature (1)..(2): Phosphorothioate linkage
  modified_base (2)..(2): 2' O-methyl modified nucleoside
  misc_feature (2)..(3): Phosphorothioate linkage
  modified_base (3)..(3): 2' fluoro-modified nucleoside
  modified_base (4)..(4): 2' O-methyl modified nucleoside
  modified_base (5)..(5): 2' fluoro-modified nucleoside
  modified_base (6)..(6): 2' O-methyl modified nucleoside
  modified_base (7)..(7): 2' fluoro-modified nucleoside
  modified_base (8)..(8): 2' fluoro-modified nucleoside
  modified_base (9)..(9): 2' fluoro-modified nucleoside
  modified_base (10)..(10): 2' O-methyl modified nucleoside
  modified_base (11)..(11): 2' fluoro-modified nucleoside
  modified_base (12)..(12): 2' O-methyl modified nucleoside
  modified_base (13)..(13): 2' fluoro-modified nucleoside
  modified_base (14)..(14): 2' O-methyl modified nucleoside
  modified_base (15)..(15): 2' fluoro-modified nucleoside
  modified_base (16)..(16): 2' O-methyl modified nucleoside
  modified_base (17)..(17): 2' fluoro-modified nucleoside
  modified_base (18)..(18): 2' O-methyl modified nucleoside
  modified_base (19)..(19): 2' fluoro-modified nucleoside
  misc_feature (19)..(20): Phosphorothioate linkage
  modified_base (20)..(20): 2' O-methyl modified nucleoside
  misc_feature (20)..(21): Phosphorothioate linkage
  modified_base (21)..(21): 2' O-methyl modified nucleoside
caucauccagagacgaaaauu

SEQ ID NO: 11134 - RNA, 21 nt, Artificial Sequence
  Description of Artificial Sequence: Synthetic oligonucleotide
  modified_base (1)..(1): 2' fluoro-modified nucleoside
  misc_feature (1)..(2): Phosphorothioate linkage
  modified_base (2)..(2): 2' O-methyl modified nucleoside
  misc_feature (2)..(3): Phosphorothioate linkage
  modified_base (3)..(3): 2' fluoro-modified nucleoside
  modified_base (4)..(4): 2' O-methyl modified nucleoside
  modified_base (5)..(5): 2' fluoro-modified nucleoside
  modified_base (6)..(6): 2' O-methyl modified nucleoside
  modified_base (7)..(7): 2' fluoro-modified nucleoside
  modified_base (8)..(8): 2' fluoro-modified nucleoside
  modified_base (9)..(9): 2' fluoro-modified nucleoside
  modified_base (10)..(10): 2' O-methyl modified nucleoside
  modified_base (11)..(11): 2' fluoro-modified nucleoside
  modified_base (12)..(12): 2' O-methyl modified nucleoside
  modified_base (13)..(13): 2' fluoro-modified nucleoside
  modified_base (14)..(14): 2' O-methyl modified nucleoside
  modified_base (15)..(15): 2' fluoro-modified nucleoside
  modified_base (16)..(16): 2' O-methyl modified nucleoside
  modified_base (17)..(17): 2' fluoro-modified nucleoside
  modified_base (18)..(18): 2' O-methyl modified nucleoside
  modified_base (19)..(19): 2' fluoro-modified nucleoside
  misc_feature (19)..(20): Phosphorothioate linkage
  modified_base (20)..(20): 2' O-methyl modified nucleoside
  misc_feature (20)..(21): Phosphorothioate linkage
  modified_base (21)..(21): 2' O-methyl modified nucleoside
aucauccagagacgaaaaauu

SEQ ID NO: 11135 - RNA, 21 nt, Artificial Sequence
  Description of Artificial Sequence: Synthetic oligonucleotide
  modified_base (1)..(1): 2' fluoro-modified nucleoside
  misc_feature (1)..(2): Phosphorothioate linkage
  modified_base (2)..(2): 2' O-methyl modified nucleoside
  misc_feature (2)..(3): Phosphorothioate linkage
  modified_base (3)..(3): 2' fluoro-modified nucleoside
  modified_base (4)..(4): 2' O-methyl modified nucleoside
  modified_base (5)..(5): 2' fluoro-modified nucleoside
  modified_base (6)..(6): 2' O-methyl modified nucleoside
  modified_base (7)..(7): 2' fluoro-modified nucleoside
  modified_base (8)..(8): 2' fluoro-modified nucleoside
  modified_base (9)..(9): 2' fluoro-modified nucleoside
  modified_base (10)..(10): 2' O-methyl modified nucleoside
  modified_base (11)..(11): 2' fluoro-modified nucleoside
  modified_base (12)..(12): 2' O-methyl modified nucleoside
  modified_base (13)..(13): 2' fluoro-modified nucleoside
  modified_base (14)..(14): 2' O-methyl modified nucleoside
  modified_base (15)..(15): 2' fluoro-modified nucleoside
  modified_base (16)..(16): 2' O-methyl modified nucleoside
  modified_base (17)..(17): 2' fluoro-modified nucleoside
  modified_base (18)..(18): 2' O-methyl modified nucleoside
  modified_base (19)..(19): 2' fluoro-modified nucleoside
  misc_feature (19)..(20): Phosphorothioate linkage
  modified_base (20)..(20): 2' O-methyl modified nucleoside
  misc_feature (20)..(21): Phosphorothioate linkage
  modified_base (21)..(21): 2' O-methyl modified nucleoside
ucauccagagacgaaaaaauu

SEQ ID NO: 11136 - RNA, 21 nt, Artificial Sequence
  Description of Artificial Sequence: Synthetic oligonucleotide
  modified_base (1)..(1): 2' fluoro-modified nucleoside
  misc_feature (1)..(2): Phosphorothioate linkage
  modified_base (2)..(2): 2' O-methyl modified nucleoside
  misc_feature (2)..(3): Phosphorothioate linkage
  modified_base (3)..(3): 2' fluoro-modified nucleoside
  modified_base (4)..(4): 2' O-methyl modified nucleoside
  modified_base (5)..(5): 2' fluoro-modified nucleoside
  modified_base (6)..(6): 2' O-methyl modified nucleoside
  modified_base (7)..(7): 2' fluoro-modified nucleoside
  modified_base (8)..(8): 2' fluoro-modified nucleoside
  modified_base (9)..(9): 2' fluoro-modified nucleoside
  modified_base (10)..(10): 2' O-methyl modified nucleoside
  modified_base (11)..(11): 2' fluoro-modified nucleoside
  modified_base (12)..(12): 2' O-methyl modified nucleoside
  modified_base (13)..(13): 2' fluoro-modified nucleoside
  modified_base (14)..(14): 2' O-methyl modified nucleoside
  modified_base (15)..(15): 2' fluoro-modified nucleoside
  modified_base (16)..(16): 2' O-methyl modified nucleoside
  modified_base (17)..(17): 2' fluoro-modified nucleoside
  modified_base (18)..(18): 2' O-methyl modified nucleoside
  modified_base (19)..(19): 2' fluoro-modified nucleoside
  misc_feature (19)..(20): Phosphorothioate linkage
  modified_base (20)..(20): 2' O-methyl modified nucleoside
  misc_feature (20)..(21): Phosphorothioate linkage
  modified_base (21)..(21): 2' O-methyl modified nucleoside
cagcauccguggggacuuauu

SEQ ID NO: 11137 - RNA, 21 nt, Artificial Sequence
  Description of Artificial Sequence: Synthetic oligonucleotide
  modified_base (1)..(1): 2' fluoro-modified nucleoside
  misc_feature (1)..(2): Phosphorothioate linkage
  modified_base (2)..(2): 2' O-methyl modified nucleoside
  misc_feature (2)..(3): Phosphorothioate linkage
  modified_base (3)..(3): 2' fluoro-modified nucleoside
  modified_base (4)..(4): 2' O-methyl modified nucleoside
  modified_base (5)..(5): 2' fluoro-modified nucleoside
  modified_base (6)..(6): 2' O-methyl modified nucleoside
  modified_base (7)..(7): 2' fluoro-modified nucleoside
  modified_base (8)..(8): 2' fluoro-modified nucleoside
  modified_base (9)..(9): 2' fluoro-modified nucleoside
  modified_base (10)..(10): 2' O-methyl modified nucleoside
  modified_base (11)..(11): 2' fluoro-modified nucleoside
  modified_base (12)..(12): 2' O-methyl modified nucleoside
  modified_base (13)..(13): 2' fluoro-modified nucleoside
  modified_base (14)..(14): 2' O-methyl modified nucleoside
  modified_base (15)..(15): 2' fluoro-modified nucleoside
  modified_base (16)..(16): 2' O-methyl modified nucleoside
  modified_base (17)..(17): 2' fluoro-modified nucleoside
  modified_base (18)..(18): 2' O-methyl modified nucleoside
  modified_base (19)..(19): 2' fluoro-modified nucleoside
  misc_feature (19)..(20): Phosphorothioate linkage
  modified_base (20)..(20): 2' O-methyl modified nucleoside
  misc_feature (20)..(21): Phosphorothioate linkage
  modified_base (21)..(21): 2' O-methyl modified nucleoside
aacacauccaccggcucuauu

SEQ ID NO: 11138 - RNA, 21 nt, Artificial Sequence
  Description of Artificial Sequence: Synthetic oligonucleotide
  modified_base (1)..(1): 2' fluoro-modified nucleoside
  misc_feature (1)..(2): Phosphorothioate linkage
  modified_base (2)..(2): 2' O-methyl modified nucleoside
  misc_feature (2)..(3): Phosphorothioate linkage
  modified_base (3)..(3): 2' fluoro-modified nucleoside
  modified_base (4)..(4): 2' O-methyl modified nucleoside
  modified_base (5)..(5): 2' fluoro-modified nucleoside
  modified_base (6)..(6): 2' O-methyl modified nucleoside
  modified_base (7)..(7): 2' fluoro-modified nucleoside
  modified_base (8)..(8): 2' fluoro-modified nucleoside
  modified_base (9)..(9): 2' fluoro-modified nucleoside
  modified_base (10)..(10): 2' O-methyl modified nucleoside
  modified_base (11)..(11): 2' fluoro-modified nucleoside
  modified_base (12)..(12): 2' O-methyl modified nucleoside
  modified_base (13)..(13): 2' fluoro-modified nucleoside
  modified_base (14)..(14): 2' O-methyl modified nucleoside
  modified_base (15)..(15): 2' fluoro-modified nucleoside
  modified_base (16)..(16): 2' O-methyl modified nucleoside
  modified_base (17)..(17): 2' fluoro-modified nucleoside
  modified_base (18)..(18): 2' O-methyl modified nucleoside
  modified_base (19)..(19): 2' fluoro-modified nucleoside
  misc_feature (19)..(20): Phosphorothioate linkage
  modified_base (20)..(20): 2' O-methyl modified nucleoside
  misc_feature (20)..(21): Phosphorothioate linkage
  modified_base (21)..(21): 2' O-methyl modified nucleoside
cauccaccggcucuccagauu

SEQ ID NO: 11139 - RNA, 21 nt, Artificial Sequence
  Description of Artificial Sequence: Synthetic oligonucleotide
  modified_base (1)..(1): 2' fluoro-modified nucleoside
  misc_feature (1)..(2): Phosphorothioate linkage
  modified_base (2)..(2): 2' O-methyl modified nucleoside
  misc_feature (2)..(3): Phosphorothioate linkage
  modified_base (3)..(3): 2' fluoro-modified nucleoside
  modified_base (4)..(4): 2' O-methyl modified nucleoside
  modified_base (5)..(5): 2' fluoro-modified nucleoside
  modified_base (6)..(6): 2' O-methyl modified nucleoside
  modified_base (7)..(7): 2' fluoro-modified nucleoside
  modified_base (8)..(8): 2' fluoro-modified nucleoside
  modified_base (9)..(9): 2' fluoro-modified nucleoside
  modified_base (10)..(10): 2' O-methyl modified nucleoside
  modified_base (11)..(11): 2' fluoro-modified nucleoside
  modified_base (12)..(12): 2' O-methyl modified nucleoside
  modified_base (13)..(13): 2' fluoro-modified nucleoside
  modified_base (14)..(14): 2' O-methyl modified nucleoside
  modified_base (15)..(15): 2' fluoro-modified nucleoside
  modified_base (16)..(16): 2' O-methyl modified nucleoside
  modified_base (17)..(17): 2' fluoro-modified nucleoside
  modified_base (18)..(18): 2' O-methyl modified nucleoside
  modified_base (19)..(19): 2' fluoro-modified nucleoside
  misc_feature (19)..(20): Phosphorothioate linkage
  modified_base (20)..(20): 2' O-methyl modified nucleoside
  misc_feature (20)..(21): Phosphorothioate linkage
  modified_base (21)..(21): 2' O-methyl modified nucleoside
ccaacccggcugcguguaauu

SEQ ID NO: 11140 - RNA, 21 nt, Artificial Sequence
  Description of Artificial Sequence: Synthetic oligonucleotide
  modified_base (1)..(1): 2' fluoro-modified nucleoside
  misc_feature (1)..(2): Phosphorothioate linkage
  modified_base (2)..(2): 2' O-methyl modified nucleoside
  misc_feature (2)..(3): Phosphorothioate linkage
  modified_base (3)..(3): 2' fluoro-modified nucleoside
  modified_base (4)..(4): 2' O-methyl modified nucleoside
  modified_base (5)..(5): 2' fluoro-modified nucleoside
  modified_base (6)..(6): 2' O-methyl modified nucleoside
  modified_base (7)..(7): 2' fluoro-modified nucleoside
  modified_base (8)..(8): 2' fluoro-modified nucleoside
  modified_base (9)..(9): 2' fluoro-modified nucleoside
  modified_base (10)..(10): 2' O-methyl modified nucleoside
  modified_base (11)..(11): 2' fluoro-modified nucleoside
  modified_base (12)..(12): 2' O-methyl modified nucleoside
  modified_base (13)..(13): 2' fluoro-modified nucleoside
  modified_base (14)..(14): 2' O-methyl modified nucleoside
  modified_base (15)..(15): 2' fluoro-modified nucleoside
  modified_base (16)..(16): 2' O-methyl modified nucleoside
  modified_base (17)..(17): 2' fluoro-modified nucleoside
  modified_base (18)..(18): 2' O-methyl modified nucleoside
  modified_base (19)..(19): 2' fluoro-modified nucleoside
  misc_feature (19)..(20): Phosphorothioate linkage
  modified_base (20)..(20): 2' O-methyl modified nucleoside
  misc_feature (20)..(21): Phosphorothioate linkage
  modified_base (21)..(21): 2' O-methyl modified nucleoside
caacccggcugcguguagauu

SEQ ID NO: 11141 - RNA, 21 nt, Artificial Sequence
  Description of Artificial Sequence: Synthetic oligonucleotide
  modified_base (1)..(1): 2' fluoro-modified nucleoside
  misc_feature (1)..(2): Phosphorothioate linkage
  modified_base (2)..(2): 2' O-methyl modified nucleoside
  misc_feature (2)..(3): Phosphorothioate linkage
  modified_base (3)..(3): 2' fluoro-modified nucleoside
  modified_base (4)..(4): 2' O-methyl modified nucleoside
  modified_base (5)..(5): 2' fluoro-modified nucleoside
  modified_base (6)..(6): 2' O-methyl modified nucleoside
  modified_base (7)..(7): 2' fluoro-modified nucleoside
  modified_base (8)..(8): 2' fluoro-modified nucleoside
  modified_base (9)..(9): 2' fluoro-modified nucleoside
  modified_base (10)..(10): 2' O-methyl modified nucleoside
  modified_base (11)..(11): 2' fluoro-modified nucleoside
  modified_base (12)..(12): 2' O-methyl modified nucleoside
  modified_base (13)..(13): 2' fluoro-modified nucleoside
  modified_base (14)..(14): 2' O-methyl modified nucleoside
  modified_base (15)..(15): 2' fluoro-modified nucleoside
  modified_base (16)..(16): 2' O-methyl modified nucleoside
  modified_base (17)..(17): 2' fluoro-modified nucleoside
  modified_base (18)..(18): 2' O-methyl modified nucleoside
  modified_base (19)..(19): 2' fluoro-modified nucleoside
  misc_feature (19)..(20): Phosphorothioate linkage
  modified_base (20)..(20): 2' O-methyl modified nucleoside
  misc_feature (20)..(21): Phosphorothioate linkage
  modified_base (21)..(21): 2' O-methyl modified nucleoside
aacccggcugcguguagaauu

SEQ ID NO: 11142 - RNA, 21 nt, Artificial Sequence
  Description of Artificial Sequence: Synthetic oligonucleotide
  modified_base (1)..(1): 2' fluoro-modified nucleoside
  misc_feature (1)..(2): Phosphorothioate linkage
  modified_base (2)..(2): 2' O-methyl modified nucleoside
  misc_feature (2)..(3): Phosphorothioate linkage
  modified_base (3)..(3): 2' fluoro-modified nucleoside
  modified_base (4)..(4): 2' O-methyl modified nucleoside
  modified_base (5)..(5): 2' fluoro-modified nucleoside
  modified_base (6)..(6): 2' O-methyl modified nucleoside
  modified_base (7)..(7): 2' fluoro-modified nucleoside
  modified_base (8)..(8): 2' fluoro-modified nucleoside
  modified_base (9)..(9): 2' fluoro-modified nucleoside
  modified_base (10)..(10): 2' O-methyl modified nucleoside
  modified_base (11)..(11): 2' fluoro-modified nucleoside
  modified_base (12)..(12): 2' O-methyl modified nucleoside
  modified_base (13)..(13): 2' fluoro-modified nucleoside
  modified_base (14)..(14): 2' O-methyl modified nucleoside
  modified_base (15)..(15): 2' fluoro-modified nucleoside
  modified_base (16)..(16): 2' O-methyl modified nucleoside
  modified_base (17)..(17): 2' fluoro-modified nucleoside
  modified_base (18)..(18): 2' O-methyl modified nucleoside
  modified_base (19)..(19): 2' fluoro-modified nucleoside
  misc_feature (19)..(20): Phosphorothioate linkage
  modified_base (20)..(20): 2' O-methyl modified nucleoside
  misc_feature (20)..(21): Phosphorothioate linkage
  modified_base (21)..(21): 2' O-methyl modified nucleoside
ggcugcguguagagauggauu

SEQ ID NO: 11143 - RNA, 21 nt, Artificial Sequence
  Description of Artificial Sequence: Synthetic oligonucleotide
  modified_base (1)..(1): 2' fluoro-modified nucleoside
  misc_feature (1)..(2): Phosphorothioate linkage
  modified_base (2)..(2): 2' O-methyl modified nucleoside
  misc_feature (2)..(3): Phosphorothioate linkage
  modified_base (3)..(3): 2' fluoro-modified nucleoside
  modified_base (4)..(4): 2' O-methyl modified nucleoside
  modified_base (5)..(5): 2' fluoro-modified nucleoside
  modified_base (6)..(6): 2' O-methyl modified nucleoside
  modified_base (7)..(7): 2' fluoro-modified nucleoside
  modified_base (8)..(8): 2' fluoro-modified nucleoside
  modified_base (9)..(9): 2' fluoro-modified nucleoside
  modified_base (10)..(10): 2' O-methyl modified nucleoside
  modified_base (11)..(11): 2' fluoro-modified nucleoside
  modified_base (12)..(12): 2' O-methyl modified nucleoside
  modified_base (13)..(13): 2' fluoro-modified nucleoside
  modified_base (14)..(14): 2' O-methyl modified nucleoside
  modified_base (15)..(15): 2' fluoro-modified nucleoside
  modified_base (16)..(16): 2' O-methyl modified nucleoside
  modified_base (17)..(17): 2' fluoro-modified nucleoside
  modified_base (18)..(18): 2' O-methyl modified nucleoside
  modified_base (19)..(19): 2' fluoro-modified nucleoside
  misc_feature (19)..(20): Phosphorothioate linkage
  modified_base (20)..(20): 2' O-methyl modified nucleoside
  misc_feature (20)..(21): Phosphorothioate linkage
  modified_base (21)..(21): 2' O-methyl modified nucleoside
gcugcguguagagauggaauu

SEQ ID NO: 11144 - RNA, 21 nt, Artificial Sequence
  Description of Artificial Sequence: Synthetic oligonucleotide
  modified_base (1)..(1): 2' fluoro-modified nucleoside
  misc_feature (1)..(2): Phosphorothioate linkage
  modified_base (2)..(2): 2' O-methyl modified nucleoside
  misc_feature (2)..(3): Phosphorothioate linkage
  modified_base (3)..(3): 2' fluoro-modified nucleoside
  modified_base (4)..(4): 2' O-methyl modified nucleoside
  modified_base (5)..(5): 2' fluoro-modified nucleoside
  modified_base (6)..(6): 2' O-methyl modified nucleoside
  modified_base (7)..(7): 2' fluoro-modified nucleoside
  modified_base (8)..(8): 2' fluoro-modified nucleoside
  modified_base (9)..(9): 2' fluoro-modified nucleoside
  modified_base (10)..(10): 2' O-methyl modified nucleoside
  modified_base (11)..(11): 2' fluoro-modified nucleoside
  modified_base (12)..(12): 2' O-methyl modified nucleoside
  modified_base (13)..(13): 2' fluoro-modified nucleoside
  modified_base (14)..(14): 2' O-methyl modified nucleoside
  modified_base (15)..(15): 2' fluoro-modified nucleoside
  modified_base (16)..(16): 2' O-methyl modified nucleoside
  modified_base (17)..(17): 2' fluoro-modified nucleoside
  modified_base (18)..(18): 2' O-methyl modified nucleoside
  modified_base (19)..(19): 2' fluoro-modified nucleoside
  misc_feature (19)..(20): Phosphorothioate linkage
  modified_base (20)..(20): 2' O-methyl modified nucleoside
  misc_feature (20)..(21): Phosphorothioate linkage
  modified_base (21)..(21): 2' O-methyl modified nucleoside
ugcguguagagauggaggauu

SEQ ID NO: 11145 - RNA, 21 nt, Artificial Sequence
  Description of Artificial Sequence: Synthetic oligonucleotide
  modified_base (1)..(1): 2' fluoro-modified nucleoside
  misc_feature (1)..(2): Phosphorothioate linkage
  modified_base (2)..(2): 2' O-methyl modified nucleoside
  misc_feature (2)..(3): Phosphorothioate linkage
  modified_base (3)..(3): 2' fluoro-modified nucleoside
  modified_base (4)..(4): 2' O-methyl modified nucleoside
  modified_base (5)..(5): 2' fluoro-modified nucleoside
  modified_base (6)..(6): 2' O-methyl modified nucleoside
  modified_base (7)..(7): 2' fluoro-modified nucleoside
  modified_base (8)..(8): 2' fluoro-modified nucleoside
  modified_base (9)..(9): 2' fluoro-modified nucleoside
  modified_base (10)..(10): 2' O-methyl modified nucleoside
  modified_base (11)..(11): 2' fluoro-modified nucleoside
  modified_base (12)..(12): 2' O-methyl modified nucleoside
  modified_base (13)..(13): 2' fluoro-modified nucleoside
  modified_base (14)..(14): 2' O-methyl modified nucleoside
  modified_base (15)..(15): 2' fluoro-modified nucleoside
  modified_base (16)..(16): 2' O-methyl modified nucleoside
  modified_base (17)..(17): 2' fluoro-modified nucleoside
  modified_base (18)..(18): 2' O-methyl modified nucleoside
  modified_base (19)..(19): 2' fluoro-modified nucleoside
  misc_feature (19)..(20): Phosphorothioate linkage
  modified_base (20)..(20): 2' O-methyl modified nucleoside
  misc_feature (20)..(21): Phosphorothioate linkage
  modified_base (21)..(21): 2' O-methyl modified nucleoside
agggcaaccugcgcuacgauu

SEQ ID NO: 11146 - RNA, 21 nt, Artificial Sequence
  Description of Artificial Sequence: Synthetic oligonucleotide
  modified_base (1)..(1): 2' fluoro-modified nucleoside
  misc_feature (1)..(2): Phosphorothioate linkage
  modified_base (2)..(2): 2' O-methyl modified nucleoside
  misc_feature (2)..(3): Phosphorothioate linkage
  modified_base (3)..(3): 2' fluoro-modified nucleoside
  modified_base (4)..(4): 2' O-methyl modified nucleoside
  modified_base (5)..(5): 2' fluoro-modified nucleoside
  modified_base (6)..(6): 2' O-methyl modified nucleoside
  modified_base (7)..(7): 2' fluoro-modified nucleoside
  modified_base (8)..(8): 2' fluoro-modified nucleoside
  modified_base (9)..(9): 2' fluoro-modified nucleoside
  modified_base (10)..(10): 2' O-methyl modified nucleoside
  modified_base (11)..(11): 2' fluoro-modified nucleoside
  modified_base (12)..(12): 2' O-methyl modified nucleoside
  modified_base (13)..(13): 2' fluoro-modified nucleoside
  modified_base (14)..(14): 2' O-methyl modified nucleoside
  modified_base (15)..(15): 2' fluoro-modified nucleoside
  modified_base (16)..(16): 2' O-methyl modified nucleoside
  modified_base (17)..(17): 2' fluoro-modified nucleoside
  modified_base (18)..(18): 2' O-methyl modified nucleoside
  modified_base (19)..(19): 2' fluoro-modified nucleoside
  misc_feature (19)..(20): Phosphorothioate linkage
  modified_base (20)..(20): 2' O-methyl modified nucleoside
  misc_feature (20)..(21): Phosphorothioate linkage
  modified_base (21)..(21): 2' O-methyl modified nucleoside
gggcaaccugcgcuacgcauu

SEQ ID NO: 11147 - RNA, 21 nt, Artificial Sequence
  Description of Artificial Sequence: Synthetic oligonucleotide
  modified_base (1)..(1): 2' fluoro-modified nucleoside
  misc_feature (1)..(2): Phosphorothioate linkage
  modified_base (2)..(2): 2' O-methyl modified nucleoside
  misc_feature (2)..(3): Phosphorothioate linkage
  modified_base (3)..(3): 2' fluoro-modified nucleoside
  modified_base (4)..(4): 2' O-methyl modified nucleoside
  modified_base (5)..(5): 2' fluoro-modified nucleoside
  modified_base (6)..(6): 2' O-methyl modified nucleoside
  modified_base (7)..(7): 2' fluoro-modified nucleoside
  modified_base (8)..(8): 2' fluoro-modified nucleoside
  modified_base (9)..(9): 2' fluoro-modified nucleoside
  modified_base (10)..(10): 2' O-methyl modified nucleoside
  modified_base (11)..(11): 2' fluoro-modified nucleoside
  modified_base (12)..(12): 2' O-methyl modified nucleoside
  modified_base (13)..(13): 2' fluoro-modified nucleoside
  modified_base (14)..(14): 2' O-methyl modified nucleoside
  modified_base (15)..(15): 2' fluoro-modified nucleoside
  modified_base (16)..(16): 2' O-methyl modified nucleoside
  modified_base (17)..(17): 2' fluoro-modified nucleoside
  modified_base (18)..(18): 2' O-methyl modified nucleoside
  modified_base (19)..(19): 2' fluoro-modified nucleoside
  misc_feature (19)..(20): Phosphorothioate linkage
  modified_base (20)..(20): 2' O-methyl modified nucleoside
  misc_feature (20)..(21): Phosphorothioate linkage
  modified_base (21)..(21): 2' O-methyl modified nucleoside
ggcaaccugcgcuacgcuauu

SEQ ID NO: 11148 - RNA, 21 nt, Artificial Sequence
  Description of Artificial Sequence: Synthetic oligonucleotide
  modified_base (1)..(1): 2' fluoro-modified nucleoside
  misc_feature (1)..(2): Phosphorothioate linkage
  modified_base (2)..(2): 2' O-methyl modified nucleoside
  misc_feature (2)..(3): Phosphorothioate linkage
  modified_base (3)..(3): 2' fluoro-modified nucleoside
  modified_base (4)..(4): 2' O-methyl modified nucleoside
  modified_base (5)..(5): 2' fluoro-modified nucleoside
  modified_base (6)..(6): 2' O-methyl modified nucleoside
  modified_base (7)..(7): 2' fluoro-modified nucleoside
  modified_base (8)..(8): 2' fluoro-modified nucleoside
  modified_base (9)..(9): 2' fluoro-modified nucleoside
  modified_base (10)..(10): 2' O-methyl modified nucleoside
  modified_base (11)..(11): 2' fluoro-modified nucleoside
  modified_base (12)..(12): 2' O-methyl modified nucleoside
  modified_base (13)..(13): 2' fluoro-modified nucleoside
  modified_base (14)..(14): 2' O-methyl modified nucleoside
  modified_base (15)..(15): 2' fluoro-modified nucleoside
  modified_base (16)..(16): 2' O-methyl modified nucleoside
  modified_base (17)..(17): 2' fluoro-modified nucleoside
  modified_base (18)..(18): 2' O-methyl modified nucleoside
  modified_base (19)..(19): 2' fluoro-modified nucleoside
  misc_feature (19)..(20): Phosphorothioate linkage
  modified_base (20)..(20): 2' O-methyl modified nucleoside
  misc_feature (20)..(21): Phosphorothioate linkage
  modified_base (21)..(21): 2' O-methyl modified nucleoside
gcaaccugcgcuacgcugauu

SEQ ID NO: 11149 - RNA, 21 nt, Artificial Sequence
  Description of Artificial Sequence: Synthetic oligonucleotide
  modified_base (1)..(1): 2' fluoro-modified nucleoside
  misc_feature (1)..(2): Phosphorothioate linkage
  modified_base (2)..(2): 2' O-methyl modified nucleoside
  misc_feature (2)..(3): Phosphorothioate linkage
  modified_base (3)..(3): 2' fluoro-modified nucleoside
  modified_base (4)..(4): 2' O-methyl modified nucleoside
  modified_base (5)..(5): 2' fluoro-modified nucleoside
  modified_base (6)..(6): 2' O-methyl modified nucleoside
  modified_base (7)..(7): 2' fluoro-modified nucleoside
  modified_base (8)..(8): 2' fluoro-modified nucleoside
  modified_base (9)..(9): 2' fluoro-modified nucleoside
  modified_base (10)..(10): 2' O-methyl modified nucleoside
  modified_base (11)..(11): 2' fluoro-modified nucleoside
  modified_base (12)..(12): 2' O-methyl modified nucleoside
  modified_base (13)..(13): 2' fluoro-modified nucleoside
  modified_base (14)..(14): 2' O-methyl modified nucleoside
  modified_base (15)..(15): 2' fluoro-modified nucleoside
  modified_base (16)..(16): 2' O-methyl modified nucleoside
  modified_base (17)..(17): 2' fluoro-modified nucleoside
  modified_base (18)..(18): 2' O-methyl modified nucleoside
  modified_base (19)..(19): 2' fluoro-modified nucleoside
  misc_feature (19)..(20): Phosphorothioate linkage
  modified_base (20)..(20): 2' O-methyl modified nucleoside
  misc_feature (20)..(21): Phosphorothioate linkage
  modified_base (21)..(21): 2' O-methyl modified nucleoside
cgcuacgcugaguauagcauu

SEQ ID NO: 11150 - RNA, 21 nt, Artificial Sequence
  Description of Artificial Sequence: Synthetic oligonucleotide
  modified_base (1)..(1): 2' fluoro-modified nucleoside
  misc_feature (1)..(2): Phosphorothioate linkage
  modified_base (2)..(2): 2' O-methyl modified nucleoside
  misc_feature (2)..(3): Phosphorothioate linkage
  modified_base (3)..(3): 2' fluoro-modified nucleoside
  modified_base (4)..(4): 2' O-methyl modified nucleoside
  modified_base (5)..(5): 2' fluoro-modified nucleoside
  modified_base (6)..(6): 2' O-methyl modified nucleoside
  modified_base (7)..(7): 2' fluoro-modified nucleoside
  modified_base (8)..(8): 2' fluoro-modified nucleoside
  modified_base (9)..(9): 2' fluoro-modified nucleoside
  modified_base (10)..(10): 2' O-methyl modified nucleoside
  modified_base (11)..(11): 2' fluoro-modified nucleoside
  modified_base (12)..(12): 2' O-methyl modified nucleoside
  modified_base (13)..(13): 2' fluoro-modified nucleoside
  modified_base (14)..(14): 2' O-methyl modified nucleoside
  modified_base (15)..(15): 2' fluoro-modified nucleoside
  modified_base (16)..(16): 2' O-methyl modified nucleoside
  modified_base (17)..(17): 2' fluoro-modified nucleoside
  modified_base (18)..(18): 2' O-methyl modified nucleoside
  modified_base (19)..(19): 2' fluoro-modified nucleoside
  misc_feature (19)..(20): Phosphorothioate linkage
  modified_base (20)..(20): 2' O-methyl modified nucleoside
  misc_feature (20)..(21): Phosphorothioate linkage
  modified_base (21)..(21): 2' O-methyl modified nucleoside
gcuacgcugaguauagccauu

SEQ ID NO: 11151 - RNA, 21 nt, Artificial Sequence
  Description of Artificial Sequence: Synthetic oligonucleotide
  modified_base (1)..(1): 2' fluoro-modified nucleoside
  misc_feature (1)..(2): Phosphorothioate linkage
  modified_base (2)..(2): 2' O-methyl modified nucleoside
  misc_feature (2)..(3): Phosphorothioate linkage
  modified_base (3)..(3): 2' fluoro-modified nucleoside
  modified_base (4)..(4): 2' O-methyl modified nucleoside
  modified_base (5)..(5): 2' fluoro-modified nucleoside
  modified_base (6)..(6): 2' O-methyl modified nucleoside
  modified_base (7)..(7): 2' fluoro-modified nucleoside
  modified_base (8)..(8): 2' fluoro-modified nucleoside
  modified_base (9)..(9): 2' fluoro-modified nucleoside
  modified_base (10)..(10): 2' O-methyl modified nucleoside
  modified_base (11)..(11): 2' fluoro-modified nucleoside
  modified_base (12)..(12): 2' O-methyl modified nucleoside
  modified_base (13)..(13): 2' fluoro-modified nucleoside
  modified_base (14)..(14): 2' O-methyl modified nucleoside
  modified_base (15)..(15): 2' fluoro-modified nucleoside
  modified_base (16)..(16): 2' O-methyl modified nucleoside
  modified_base (17)..(17): 2' fluoro-modified nucleoside
  modified_base (18)..(18): 2' O-methyl modified nucleoside
  modified_base (19)..(19): 2' fluoro-modified nucleoside
  misc_feature (19)..(20): Phosphorothioate linkage
  modified_base (20)..(20): 2' O-methyl modified nucleoside
  misc_feature (20)..(21): Phosphorothioate linkage
  modified_base (21)..(21): 2' O-methyl modified nucleoside
cuacgcugaguauagccaauu

SEQ ID NO: 11152 - RNA, 21 nt, Artificial Sequence
  Description of Artificial Sequence: Synthetic oligonucleotide
  modified_base (1)..(1): 2' fluoro-modified nucleoside
  misc_feature (1)..(2): Phosphorothioate linkage
  modified_base (2)..(2): 2' O-methyl modified nucleoside
  misc_feature (2)..(3): Phosphorothioate linkage
  modified_base (3)..(3): 2' fluoro-modified nucleoside
  modified_base (4)..(4): 2' O-methyl modified nucleoside
  modified_base (5)..(5): 2' fluoro-modified nucleoside
  modified_base (6)..(6): 2' O-methyl modified nucleoside
  modified_base (7)..(7): 2' fluoro-modified nucleoside
  modified_base (8)..(8): 2' fluoro-modified nucleoside
  modified_base (9)..(9): 2' fluoro-modified nucleoside
  modified_base (10)..(10): 2' O-methyl modified nucleoside
  modified_base (11)..(11): 2' fluoro-modified nucleoside
  modified_base (12)..(12): 2' O-methyl modified nucleoside
  modified_base (13)..(13): 2' fluoro-modified nucleoside
  modified_base (14)..(14): 2' O-methyl modified nucleoside
  modified_base (15)..(15): 2' fluoro-modified nucleoside
  modified_base (16)..(16): 2' O-methyl modified nucleoside
  modified_base (17)..(17): 2' fluoro-modified nucleoside
  modified_base (18)..(18): 2' O-methyl modified nucleoside
  modified_base (19)..(19): 2' fluoro-modified nucleoside
  misc_feature (19)..(20): Phosphorothioate linkage
  modified_base (20)..(20): 2' O-methyl modified nucleoside
  misc_feature (20)..(21): Phosphorothioate linkage
  modified_base (21)..(21): 2' O-methyl modified nucleoside
uacgcugaguauagccacauu

SEQ ID NO: 11153 - RNA, 21 nt, Artificial Sequence
  Description of Artificial Sequence: Synthetic oligonucleotide
  modified_base (1)..(1): 2' fluoro-modified nucleoside
  misc_feature (1)..(2): Phosphorothioate linkage
  modified_base (2)..(2): 2' O-methyl modified nucleoside
  misc_feature (2)..(3): Phosphorothioate linkage
  modified_base (3)..(3): 2' fluoro-modified nucleoside
  modified_base (4)..(4): 2' O-methyl modified nucleoside
  modified_base (5)..(5): 2' fluoro-modified nucleoside
  modified_base (6)..(6): 2' O-methyl modified nucleoside
  modified_base (7)..(7): 2' fluoro-modified nucleoside
  modified_base (8)..(8): 2' fluoro-modified nucleoside
  modified_base (9)..(9): 2' fluoro-modified nucleoside
  modified_base (10)..(10): 2' O-methyl modified nucleoside
  modified_base (11)..(11): 2' fluoro-modified nucleoside
  modified_base (12)..(12): 2' O-methyl modified nucleoside
  modified_base (13)..(13): 2' fluoro-modified nucleoside
  modified_base (14)..(14): 2' O-methyl modified nucleoside
  modified_base (15)..(15): 2' fluoro-modified nucleoside
  modified_base (16)..(16): 2' O-methyl modified nucleoside
  modified_base (17)..(17): 2' fluoro-modified nucleoside
  modified_base (18)..(18): 2' O-methyl modified nucleoside
  modified_base (19)..(19): 2' fluoro-modified nucleoside
  misc_feature (19)..(20): Phosphorothioate linkage
  modified_base (20)..(20): 2' O-methyl modified nucleoside
  misc_feature (20)..(21): Phosphorothioate linkage
  modified_base (21)..(21): 2' O-methyl modified nucleoside
gaacucaacagcuaucgcauu

SEQ ID NO: 11154 - RNA, 21 nt, Artificial Sequence
  Description of Artificial Sequence: Synthetic oligonucleotide
  modified_base (1)..(1): 2' fluoro-modified nucleoside
  misc_feature (1)..(2): Phosphorothioate linkage
  modified_base (2)..(2): 2' O-methyl modified nucleoside
  misc_feature (2)..(3): Phosphorothioate linkage
  modified_base (3)..(3): 2' fluoro-modified nucleoside
  modified_base (4)..(4): 2' O-methyl modified nucleoside
  modified_base (5)..(5): 2' fluoro-modified nucleoside
  modified_base (6)..(6): 2' O-methyl modified nucleoside
  modified_base (7)..(7): 2' fluoro-modified nucleoside
  modified_base (8)..(8): 2' fluoro-modified nucleoside
  modified_base (9)..(9): 2' fluoro-modified nucleoside
  modified_base (10)..(10): 2' O-methyl modified nucleoside
  modified_base (11)..(11): 2' fluoro-modified nucleoside
  modified_base (12)..(12): 2' O-methyl modified nucleoside
  modified_base (13)..(13): 2' fluoro-modified nucleoside
  modified_base (14)..(14): 2' O-methyl modified nucleoside
  modified_base (15)..(15): 2' fluoro-modified nucleoside
  modified_base (16)..(16): 2' O-methyl modified nucleoside
  modified_base (17)..(17): 2' fluoro-modified nucleoside
  modified_base (18)..(18): 2' O-methyl modified nucleoside
  modified_base (19)..(19): 2' fluoro-modified nucleoside
  misc_feature (19)..(20): Phosphorothioate linkage
  modified_base (20)..(20): 2' O-methyl modified nucleoside
  misc_feature (20)..(21): Phosphorothioate linkage
  modified_base (21)..(21): 2' O-methyl modified nucleoside
aacagcuaucgccucuucauu

SEQ ID NO: 11155 - RNA, 21 nt, Artificial Sequence
  Description of Artificial Sequence: Synthetic oligonucleotide
  modified_base (1)..(1): 2' fluoro-modified nucleoside
  misc_feature (1)..(2): Phosphorothioate linkage
  modified_base (2)..(2): 2' O-methyl modified nucleoside
  misc_feature (2)..(3): Phosphorothioate linkage
  modified_base (3)..(3): 2' fluoro-modified nucleoside
  modified_base (4)..(4): 2' O-methyl modified nucleoside
  modified_base (5)..(5): 2' fluoro-modified nucleoside
  modified_base (6)..(6): 2' O-methyl modified nucleoside
  modified_base (7)..(7): 2' fluoro-modified nucleoside
  modified_base (8)..(8): 2' fluoro-modified nucleoside
  modified_base (9)..(9): 2' fluoro-modified nucleoside
  modified_base (10)..(10): 2' O-methyl modified nucleoside
  modified_base (11)..(11): 2' fluoro-modified nucleoside
  modified_base (12)..(12): 2' O-methyl modified nucleoside
  modified_base (13)..(13): 2' fluoro-modified nucleoside
  modified_base (14)..(14): 2' O-methyl modified nucleoside
  modified_base (15)..(15): 2' fluoro-modified nucleoside
  modified_base (16)..(16): 2' O-methyl modified nucleoside
  modified_base (17)..(17): 2' fluoro-modified nucleoside
  modified_base (18)..(18): 2' O-methyl modified nucleoside
  modified_base (19)..(19): 2' fluoro-modified nucleoside
  misc_feature (19)..(20): Phosphorothioate linkage
  modified_base (20)..(20): 2' O-methyl modified nucleoside
  misc_feature (20)..(21): Phosphorothioate linkage
  modified_base (21)..(21): 2' O-methyl modified nucleoside
cuggggaacuacacuggcauu

SEQ ID NO: 11156 - RNA, 21 nt, Artificial Sequence
  Description of Artificial Sequence: Synthetic oligonucleotide
  modified_base (1)..(1): 2' fluoro-modified nucleoside
  misc_feature (1)..(2): Phosphorothioate linkage
  modified_base (2)..(2): 2' O-methyl modified nucleoside
  misc_feature (2)..(3): Phosphorothioate linkage
  modified_base (3)..(3): 2' fluoro-modified nucleoside
  modified_base (4)..(4): 2' O-methyl modified nucleoside
  modified_base (5)..(5): 2' fluoro-modified nucleoside
  modified_base (6)..(6): 2' O-methyl modified nucleoside
  modified_base (7)..(7): 2' fluoro-modified nucleoside
  modified_base (8)..(8): 2' fluoro-modified nucleoside
  modified_base (9)..(9): 2' fluoro-modified nucleoside
  modified_base (10)..(10): 2' O-methyl modified nucleoside
  modified_base (11)..(11): 2' fluoro-modified nucleoside
  modified_base (12)..(12): 2' O-methyl modified nucleoside
  modified_base (13)..(13): 2' fluoro-modified nucleoside
  modified_base (14)..(14): 2' O-methyl modified nucleoside
  modified_base (15)..(15): 2' fluoro-modified nucleoside
  modified_base (16)..(16): 2' O-methyl modified nucleoside
  modified_base (17)..(17): 2' fluoro-modified nucleoside
  modified_base (18)..(18): 2' O-methyl modified nucleoside
  modified_base (19)..(19): 2' fluoro-modified nucleoside
  misc_feature (19)..(20): Phosphorothioate linkage
  modified_base (20)..(20): 2' O-methyl modified nucleoside
  misc_feature (20)..(21): Phosphorothioate linkage
  modified_base (21)..(21): 2' O-methyl modified nucleoside
gggaacuacacuggcaauauu

SEQ ID NO: 11157 - RNA, 21 nt, Artificial Sequence
  Description of Artificial Sequence: Synthetic oligonucleotide
  modified_base (1)..(1): 2' fluoro-modified nucleoside
  misc_feature (1)..(2): Phosphorothioate linkage
  modified_base (2)..(2): 2' O-methyl modified nucleoside
  misc_feature (2)..(3): Phosphorothioate linkage
  modified_base (3)..(3): 2' fluoro-modified nucleoside
  modified_base (4)..(4): 2' O-methyl modified nucleoside
  modified_base (5)..(5): 2' fluoro-modified nucleoside
  modified_base (6)..(6): 2' O-methyl modified nucleoside
  modified_base (7)..(7): 2' fluoro-modified nucleoside
  modified_base (8)..(8): 2' fluoro-modified nucleoside
  modified_base (9)..(9): 2' fluoro-modified nucleoside
  modified_base (10)..(10): 2' O-methyl modified nucleoside
  modified_base (11)..(11): 2' fluoro-modified nucleoside
  modified_base (12)..(12): 2' O-methyl modified nucleoside
  modified_base (13)..(13): 2' fluoro-modified nucleoside
  modified_base (14)..(14): 2' O-methyl modified nucleoside
  modified_base (15)..(15): 2' fluoro-modified nucleoside
  modified_base (16)..(16): 2' O-methyl modified nucleoside
  modified_base (17)..(17): 2' fluoro-modified nucleoside
  modified_base (18)..(18): 2' O-methyl modified nucleoside
  modified_base (19)..(19): 2' fluoro-modified nucleoside
  misc_feature (19)..(20): Phosphorothioate linkage
  modified_base (20)..(20): 2' O-methyl modified nucleoside
  misc_feature (20)..(21): Phosphorothioate linkage
  modified_base (21)..(21): 2' O-methyl modified nucleoside
aacuacacuggcaaugugauu

SEQ ID NO: 11158 - RNA, 21 nt, Artificial Sequence
  Description of Artificial Sequence: Synthetic oligonucleotide
  modified_base (1)..(1): 2' fluoro-modified nucleoside
  misc_feature (1)..(2): Phosphorothioate linkage
  modified_base (2)..(2): 2' O-methyl modified nucleoside
  misc_feature (2)..(3): Phosphorothioate linkage
  modified_base (3)..(3): 2' fluoro-modified nucleoside
  modified_base (4)..(4): 2' O-methyl modified nucleoside
  modified_base (5)..(5): 2' fluoro-modified nucleoside
  modified_base (6)..(6): 2' O-methyl modified nucleoside
  modified_base (7)..(7): 2' fluoro-modified nucleoside
  modified_base (8)..(8): 2' fluoro-modified nucleoside
  modified_base (9)..(9): 2' fluoro-modified nucleoside
  modified_base (10)..(10): 2' O-methyl modified nucleoside
  modified_base (11)..(11): 2' fluoro-modified nucleoside
  modified_base (12)..(12): 2' O-methyl modified nucleoside
  modified_base (13)..(13): 2' fluoro-modified nucleoside
  modified_base (14)..(14): 2' O-methyl modified nucleoside
  modified_base (15)..(15): 2' fluoro-modified nucleoside
  modified_base (16)..(16): 2' O-methyl modified nucleoside
  modified_base (17)..(17): 2' fluoro-modified nucleoside
  modified_base (18)..(18): 2' O-methyl modified nucleoside
  modified_base (19)..(19): 2' fluoro-modified nucleoside
  misc_feature (19)..(20): Phosphorothioate linkage
  modified_base (20)..(20): 2' O-methyl modified nucleoside
  misc_feature (20)..(21): Phosphorothioate linkage
  modified_base (21)..(21): 2' O-methyl modified nucleoside
cuacacuggcaaugugggauu

SEQ ID NO: 11159 - RNA, 21 nt, Artificial Sequence
  Description of Artificial Sequence: Synthetic oligonucleotide
  modified_base (1)..(1): 2' fluoro-modified nucleoside
  misc_feature (1)..(2): Phosphorothioate linkage
  modified_base (2)..(2): 2' O-methyl modified nucleoside
  misc_feature (2)..(3): Phosphorothioate linkage
  modified_base (3)..(3): 2' fluoro-modified nucleoside
  modified_base (4)..(4): 2' O-methyl modified nucleoside
  modified_base (5)..(5): 2' fluoro-modified nucleoside
  modified_base (6)..(6): 2' O-methyl modified nucleoside
  modified_base (7)..(7): 2' fluoro-modified nucleoside
  modified_base (8)..(8): 2' fluoro-modified nucleoside
  modified_base (9)..(9): 2' fluoro-modified nucleoside
  modified_base (10)..(10): 2' O-methyl modified nucleoside
  modified_base (11)..(11): 2' fluoro-modified nucleoside
  modified_base (12)..(12): 2' O-methyl modified nucleoside
  modified_base (13)..(13): 2' fluoro-modified nucleoside
  modified_base (14)..(14): 2' O-methyl modified nucleoside
  modified_base (15)..(15): 2' fluoro-modified nucleoside
  modified_base (16)..(16): 2' O-methyl modified nucleoside
  modified_base (17)..(17): 2' fluoro-modified nucleoside
  modified_base (18)..(18): 2' O-methyl modified nucleoside
  modified_base (19)..(19): 2' fluoro-modified nucleoside
  misc_feature (19)..(20): Phosphorothioate linkage
  modified_base (20)..(20): 2' O-methyl modified nucleoside
  misc_feature (20)..(21): Phosphorothioate linkage
  modified_base (21)..(21): 2' O-methyl modified nucleoside
cuggcaauguggggaacgauu

SEQ ID NO: 11160 - RNA, 21 nt, Artificial Sequence
  Description of Artificial Sequence: Synthetic oligonucleotide
  modified_base (1)..(1): 2' fluoro-modified nucleoside
  misc_feature (1)..(2): Phosphorothioate linkage
  modified_base (2)..(2): 2' O-methyl modified nucleoside
  misc_feature (2)..(3): Phosphorothioate linkage
  modified_base (3)..(3): 2' fluoro-modified nucleoside
  modified_base (4)..(4): 2' O-methyl modified nucleoside
  modified_base (5)..(5): 2' fluoro-modified nucleoside
  modified_base (6)..(6): 2' O-methyl modified nucleoside
  modified_base (7)..(7): 2' fluoro-modified nucleoside
  modified_base (8)..(8): 2' fluoro-modified nucleoside
  modified_base (9)..(9): 2' fluoro-modified nucleoside
  modified_base (10)..(10): 2' O-methyl modified nucleoside
  modified_base (11)..(11): 2' fluoro-modified nucleoside
  modified_base (12)..(12): 2' O-methyl modified nucleoside
  modified_base (13)..(13): 2' fluoro-modified nucleoside
  modified_base (14)..(14): 2' O-methyl modified nucleoside
  modified_base (15)..(15): 2' fluoro-modified nucleoside
  modified_base (16)..(16): 2' O-methyl modified nucleoside
  modified_base (17)..(17): 2' fluoro-modified nucleoside
  modified_base (18)..(18): 2' O-methyl modified nucleoside
  modified_base (19)..(19): 2' fluoro-modified nucleoside
  misc_feature (19)..(20): Phosphorothioate linkage
  modified_base (20)..(20): 2' O-methyl modified nucleoside
  misc_feature (20)..(21): Phosphorothioate linkage
  modified_base (21)..(21): 2' O-methyl modified nucleoside
uggcaauguggggaacgaauu

SEQ ID NO: 11161 - RNA, 21 nt, Artificial Sequence
  Description of Artificial Sequence: Synthetic oligonucleotide
  modified_base (1)..(1): 2' fluoro-modified nucleoside
  misc_feature (1)..(2): Phosphorothioate linkage
  modified_base (2)..(2): 2' O-methyl modified nucleoside
  misc_feature (2)..(3): Phosphorothioate linkage
  modified_base (3)..(3): 2' fluoro-modified nucleoside
  modified_base (4)..(4): 2' O-methyl modified nucleoside
  modified_base (5)..(5): 2' fluoro-modified nucleoside
  modified_base (6)..(6): 2' O-methyl modified nucleoside
  modified_base (7)..(7): 2' fluoro-modified nucleoside
  modified_base (8)..(8): 2' fluoro-modified nucleoside
  modified_base (9)..(9): 2' fluoro-modified nucleoside
  modified_base (10)..(10): 2' O-methyl modified nucleoside
  modified_base (11)..(11): 2' fluoro-modified nucleoside
  modified_base (12)..(12): 2' O-methyl modified nucleoside
  modified_base (13)..(13): 2' fluoro-modified nucleoside
  modified_base (14)..(14): 2' O-methyl modified nucleoside
  modified_base (15)..(15): 2' fluoro-modified nucleoside
  modified_base (16)..(16): 2' O-methyl modified nucleoside
  modified_base (17)..(17): 2' fluoro-modified nucleoside
  modified_base (18)..(18): 2' O-methyl modified nucleoside
  modified_base (19)..(19): 2' fluoro-modified nucleoside
  misc_feature (19)..(20): Phosphorothioate linkage
  modified_base (20)..(20): 2' O-methyl modified nucleoside
  misc_feature (20)..(21): Phosphorothioate linkage
  modified_base (21)..(21): 2' O-methyl modified nucleoside
ggcaauguggggaacgacauu

SEQ ID NO: 11162 - RNA, 21 nt, Artificial Sequence
  Description of Artificial Sequence: Synthetic oligonucleotide
  modified_base (1)..(1): 2' fluoro-modified nucleoside
  misc_feature (1)..(2): Phosphorothioate linkage
  modified_base (2)..(2): 2' O-methyl modified nucleoside
  misc_feature (2)..(3): Phosphorothioate linkage
  modified_base (3)..(3): 2' fluoro-modified nucleoside
  modified_base (4)..(4): 2' O-methyl modified nucleoside
  modified_base (5)..(5): 2' fluoro-modified nucleoside
  modified_base (6)..(6): 2' O-methyl modified nucleoside
  modified_base (7)..(7): 2' fluoro-modified nucleoside
  modified_base (8)..(8): 2' fluoro-modified nucleoside
  modified_base (9)..(9): 2' fluoro-modified nucleoside
  modified_base (10)..(10): 2' O-methyl modified nucleoside
  modified_base (11)..(11): 2' fluoro-modified nucleoside
  modified_base (12)..(12): 2' O-methyl modified nucleoside
  modified_base (13)..(13): 2' fluoro-modified nucleoside
  modified_base (14)..(14): 2' O-methyl modified nucleoside
  modified_base (15)..(15): 2' fluoro-modified nucleoside
  modified_base (16)..(16): 2' O-methyl modified nucleoside
  modified_base (17)..(17): 2' fluoro-modified nucleoside
  modified_base (18)..(18): 2' O-methyl modified nucleoside
  modified_base (19)..(19): 2' fluoro-modified nucleoside
  misc_feature (19)..(20): Phosphorothioate linkage
  modified_base (20)..(20): 2' O-methyl modified nucleoside
  misc_feature (20)..(21): Phosphorothioate linkage
  modified_base (21)..(21): 2' O-methyl modified nucleoside
gcaauguggggaacgacgauu

SEQ ID NO: 11163 - RNA, 21 nt, Artificial Sequence
  Description of Artificial Sequence: Synthetic oligonucleotide
  modified_base (1)..(1): 2' fluoro-modified nucleoside
  misc_feature (1)..(2): Phosphorothioate linkage
  modified_base (2)..(2): 2' O-methyl modified nucleoside
  misc_feature (2)..(3): Phosphorothioate linkage
  modified_base (3)..(3): 2' fluoro-modified nucleoside
  modified_base (4)..(4): 2' O-methyl modified nucleoside
  modified_base (5)..(5): 2' fluoro-modified nucleoside
  modified_base (6)..(6): 2' O-methyl modified nucleoside
  modified_base (7)..(7): 2' fluoro-modified nucleoside
  modified_base (8)..(8): 2' fluoro-modified nucleoside
  modified_base (9)..(9): 2' fluoro-modified nucleoside
  modified_base (10)..(10): 2' O-methyl modified nucleoside
  modified_base (11)..(11): 2' fluoro-modified nucleoside
  modified_base (12)..(12): 2' O-methyl modified nucleoside
  modified_base (13)..(13): 2' fluoro-modified nucleoside
  modified_base (14)..(14): 2' O-methyl modified nucleoside
  modified_base (15)..(15): 2' fluoro-modified nucleoside
  modified_base (16)..(16): 2' O-methyl modified nucleoside
  modified_base (17)..(17): 2' fluoro-modified nucleoside
  modified_base (18)..(18): 2' O-methyl modified nucleoside
  modified_base (19)..(19): 2' fluoro-modified nucleoside
  misc_feature (19)..(20): Phosphorothioate linkage
  modified_base (20)..(20): 2' O-methyl modified nucleoside
  misc_feature (20)..(21): Phosphorothioate linkage
  modified_base (21)..(21): 2' O-methyl modified nucleoside
caauguggggaacgacgcauu

SEQ ID NO: 11164 - RNA, 21 nt, Artificial Sequence
  Description of Artificial Sequence: Synthetic oligonucleotide
  modified_base (1)..(1): 2' fluoro-modified nucleoside
  misc_feature (1)..(2): Phosphorothioate linkage
  modified_base (2)..(2): 2' O-methyl modified nucleoside
  misc_feature (2)..(3): Phosphorothioate linkage
  modified_base (3)..(3): 2' fluoro-modified nucleoside
  modified_base (4)..(4): 2' O-methyl modified nucleoside
  modified_base (5)..(5): 2' fluoro-modified nucleoside
  modified_base (6)..(6): 2' O-methyl modified nucleoside
  modified_base (7)..(7): 2' fluoro-modified nucleoside
  modified_base (8)..(8): 2' fluoro-modified nucleoside
  modified_base (9)..(9): 2' fluoro-modified nucleoside
  modified_base (10)..(10): 2' O-methyl modified nucleoside
  modified_base (11)..(11): 2' fluoro-modified nucleoside
  modified_base (12)..(12): 2' O-methyl modified nucleoside
  modified_base (13)..(13): 2' fluoro-modified nucleoside
  modified_base (14)..(14): 2' O-methyl modified nucleoside
  modified_base (15)..(15): 2' fluoro-modified nucleoside
  modified_base (16)..(16): 2' O-methyl modified nucleoside
  modified_base (17)..(17): 2' fluoro-modified nucleoside
  modified_base (18)..(18): 2' O-methyl modified nucleoside
  modified_base (19)..(19): 2' fluoro-modified nucleoside
  misc_feature (19)..(20): Phosphorothioate linkage
  modified_base (20)..(20): 2' O-methyl modified nucleoside
  misc_feature (20)..(21): Phosphorothioate linkage
  modified_base (21)..(21): 2' O-methyl modified nucleoside
gggaacgacgcccuccagauu

SEQ ID NO: 11165 - RNA, 21 nt, Artificial Sequence
  Description of Artificial Sequence: Synthetic oligonucleotide
  modified_base (1)..(1): 2' fluoro-modified nucleoside
  misc_feature (1)..(2): Phosphorothioate linkage
  modified_base (2)..(2): 2' O-methyl modified nucleoside
  misc_feature (2)..(3): Phosphorothioate linkage
  modified_base (3)..(3): 2' fluoro-modified nucleoside
  modified_base (4)..(4): 2' O-methyl modified nucleoside
  modified_base (5)..(5): 2' fluoro-modified nucleoside
  modified_base (6)..(6): 2' O-methyl modified nucleoside
  modified_base (7)..(7): 2' fluoro-modified nucleoside
  modified_base (8)..(8): 2' fluoro-modified nucleoside
  modified_base (9)..(9): 2' fluoro-modified nucleoside
  modified_base (10)..(10): 2' O-methyl modified nucleoside
  modified_base (11)..(11): 2' fluoro-modified nucleoside
  modified_base (12)..(12): 2' O-methyl modified nucleoside
  modified_base (13)..(13): 2' fluoro-modified nucleoside
  modified_base (14)..(14): 2' O-methyl modified nucleoside
  modified_base (15)..(15): 2' fluoro-modified nucleoside
  modified_base (16)..(16): 2' O-methyl modified nucleoside
  modified_base (17)..(17): 2' fluoro-modified nucleoside
  modified_base (18)..(18): 2' O-methyl modified nucleoside
  modified_base (19)..(19): 2' fluoro-modified nucleoside
  misc_feature (19)..(20): Phosphorothioate linkage
  modified_base (20)..(20): 2' O-methyl modified nucleoside
  misc_feature (20)..(21): Phosphorothioate linkage
  modified_base (21)..(21): 2' O-methyl modified nucleoside
gaacgacgcccuccaguaauu

SEQ ID NO: 11166 - RNA, 21 nt, Artificial Sequence
  Description of Artificial Sequence: Synthetic oligonucleotide
  modified_base (1)..(1): 2' fluoro-modified nucleoside
  misc_feature (1)..(2): Phosphorothioate linkage
  modified_base (2)..(2): 2' O-methyl modified nucleoside
  misc_feature (2)..(3): Phosphorothioate linkage
  modified_base (3)..(3): 2' fluoro-modified nucleoside
  modified_base (4)..(4): 2' O-methyl modified nucleoside
  modified_base (5)..(5): 2' fluoro-modified nucleoside
  modified_base (6)..(6): 2' O-methyl modified nucleoside
  modified_base (7)..(7): 2' fluoro-modified nucleoside
  modified_base (8)..(8): 2' fluoro-modified nucleoside
  modified_base (9)..(9): 2' fluoro-modified nucleoside
  modified_base (10)..(10): 2' O-methyl modified nucleoside
  modified_base (11)..(11): 2' fluoro-modified nucleoside
  modified_base (12)..(12): 2' O-methyl modified nucleoside
  modified_base (13)..(13): 2' fluoro-modified nucleoside
  modified_base (14)..(14): 2' O-methyl modified nucleoside
  modified_base (15)..(15): 2' fluoro-modified nucleoside
  modified_base (16)..(16): 2' O-methyl modified nucleoside
  modified_base (17)..(17): 2' fluoro-modified nucleoside
  modified_base (18)..(18): 2' O-methyl modified nucleoside
  modified_base (19)..(19): 2' fluoro-modified nucleoside
  misc_feature (19)..(20): Phosphorothioate linkage
  modified_base (20)..(20): 2' O-methyl modified nucleoside
  misc_feature (20)..(21): Phosphorothioate linkage
  modified_base (21)..(21): 2' O-methyl modified nucleoside
aacgacgcccuccaguauauu

SEQ ID NO: 11167 - RNA, 21 nt, Artificial Sequence
  Description of Artificial Sequence: Synthetic oligonucleotide
  modified_base (1)..(1): 2' fluoro-modified nucleoside
  misc_feature (1)..(2): Phosphorothioate linkage
  modified_base (2)..(2): 2' O-methyl modified nucleoside
  misc_feature (2)..(3): Phosphorothioate linkage
  modified_base (3)..(3): 2' fluoro-modified nucleoside
  modified_base (4)..(4): 2' O-methyl modified nucleoside
  modified_base (5)..(5): 2' fluoro-modified nucleoside
  modified_base (6)..(6): 2' O-methyl modified nucleoside
  modified_base (7)..(7): 2' fluoro-modified nucleoside
  modified_base (8)..(8): 2' fluoro-modified nucleoside
  modified_base (9)..(9): 2' fluoro-modified nucleoside
  modified_base (10)..(10): 2' O-methyl modified nucleoside
  modified_base (11)..(11): 2' fluoro-modified nucleoside
  modified_base (12)..(12): 2' O-methyl modified nucleoside
  modified_base (13)..(13): 2' fluoro-modified nucleoside
  modified_base (14)..(14): 2' O-methyl modified nucleoside
  modified_base (15)..(15): 2' fluoro-modified nucleoside
  modified_base (16)..(16): 2' O-methyl modified nucleoside
  modified_base (17)..(17): 2' fluoro-modified nucleoside
  modified_base (18)..(18): 2' O-methyl modified nucleoside
  modified_base (19)..(19): 2' fluoro-modified nucleoside
  misc_feature (19)..(20): Phosphorothioate linkage
  modified_base (20)..(20): 2' O-methyl modified nucleoside
  misc_feature (20)..(21): Phosphorothioate linkage
  modified_base (21)..(21): 2' O-methyl modified nucleoside
acgacgcccuccaguaucauu

SEQ ID NO: 11168 - RNA, 21 nt, Artificial Sequence
  Description of Artificial Sequence: Synthetic oligonucleotide
  modified_base (1)..(1): 2' fluoro-modified nucleoside
  misc_feature (1)..(2): Phosphorothioate linkage
  modified_base (2)..(2): 2' O-methyl modified nucleoside
  misc_feature (2)..(3): Phosphorothioate linkage
  modified_base (3)..(3): 2' fluoro-modified nucleoside
  modified_base (4)..(4): 2' O-methyl modified nucleoside
  modified_base (5)..(5): 2' fluoro-modified nucleoside
  modified_base (6)..(6): 2' O-methyl modified nucleoside
  modified_base (7)..(7): 2' fluoro-modified nucleoside
  modified_base (8)..(8): 2' fluoro-modified nucleoside
  modified_base (9)..(9): 2' fluoro-modified nucleoside
  modified_base (10)..(10): 2' O-methyl modified nucleoside
  modified_base (11)..(11): 2' fluoro-modified nucleoside
  modified_base (12)..(12): 2' O-methyl modified nucleoside
  modified_base (13)..(13): 2' fluoro-modified nucleoside
  modified_base (14)..(14): 2' O-methyl modified nucleoside
  modified_base (15)..(15): 2' fluoro-modified nucleoside
  modified_base (16)..(16): 2' O-methyl modified nucleoside
  modified_base (17)..(17): 2' fluoro-modified nucleoside
  modified_base (18)..(18): 2' O-methyl modified nucleoside
  modified_base (19)..(19): 2' fluoro-modified nucleoside
  misc_feature (19)..(20): Phosphorothioate linkage
  modified_base (20)..(20): 2' O-methyl modified nucleoside
  misc_feature (20)..(21): Phosphorothioate linkage
  modified_base (21)..(21): 2' O-methyl modified nucleoside
gcccuccaguaucauaacauu

SEQ ID NO: 11169 - RNA, 21 nt, Artificial Sequence
  Description of Artificial Sequence: Synthetic oligonucleotide
  modified_base (1)..(1): 2' fluoro-modified nucleoside
  misc_feature (1)..(2): Phosphorothioate linkage
  modified_base (2)..(2): 2' O-methyl modified nucleoside
  misc_feature (2)..(3): Phosphorothioate linkage
  modified_base (3)..(3): 2' fluoro-modified nucleoside
  modified_base (4)..(4): 2' O-methyl modified nucleoside
  modified_base (5)..(5): 2' fluoro-modified nucleoside
  modified_base (6)..(6): 2' O-methyl modified nucleoside
  modified_base (7)..(7): 2' fluoro-modified nucleoside
  modified_base (8)..(8): 2' fluoro-modified nucleoside
  modified_base (9)..(9): 2' fluoro-modified nucleoside
  modified_base (10)..(10): 2' O-methyl modified nucleoside
  modified_base (11)..(11): 2' fluoro-modified nucleoside
  modified_base (12)..(12): 2' O-methyl modified nucleoside
  modified_base (13)..(13): 2' fluoro-modified nucleoside
  modified_base (14)..(14): 2' O-methyl modified nucleoside
  modified_base (15)..(15): 2' fluoro-modified nucleoside
  modified_base (16)..(16): 2' O-methyl modified nucleoside
  modified_base (17)..(17): 2' fluoro-modified nucleoside
  modified_base (18)..(18): 2' O-methyl modified nucleoside
  modified_base (19)..(19): 2' fluoro-modified nucleoside
  misc_feature (19)..(20): Phosphorothioate linkage
  modified_base (20)..(20): 2' O-methyl modified nucleoside
  misc_feature (20)..(21): Phosphorothioate linkage
  modified_base (21)..(21): 2' O-methyl modified nucleoside
aguaucauaacaacacagauu

SEQ ID NO: 11170 - RNA, 21 nt, Artificial Sequence
  Description of Artificial Sequence: Synthetic oligonucleotide
  modified_base (1)..(1): 2' fluoro-modified nucleoside
  misc_feature (1)..(2): Phosphorothioate linkage
  modified_base (2)..(2): 2' O-methyl modified nucleoside
  misc_feature (2)..(3): Phosphorothioate linkage
  modified_base (3)..(3): 2' fluoro-modified nucleoside
  modified_base (4)..(4): 2' O-methyl modified nucleoside
  modified_base (5)..(5): 2' fluoro-modified nucleoside
  modified_base (6)..(6): 2' O-methyl modified nucleoside
  modified_base (7)..(7): 2' fluoro-modified nucleoside
  modified_base (8)..(8): 2' fluoro-modified nucleoside
  modified_base (9)..(9): 2' fluoro-modified nucleoside
  modified_base (10)..(10): 2' O-methyl modified nucleoside
  modified_base (11)..(11): 2' fluoro-modified nucleoside
  modified_base (12)..(12): 2' O-methyl modified nucleoside
  modified_base (13)..(13): 2' fluoro-modified nucleoside
  modified_base (14)..(14): 2' O-methyl modified nucleoside
  modified_base (15)..(15): 2' fluoro-modified nucleoside
  modified_base (16)..(16): 2' O-methyl modified nucleoside
  modified_base (17)..(17): 2' fluoro-modified nucleoside
  modified_base (18)..(18): 2' O-methyl modified nucleoside
  modified_base (19)..(19): 2' fluoro-modified nucleoside
  misc_feature (19)..(20): Phosphorothioate linkage
  modified_base (20)..(20): 2' O-methyl modified nucleoside
  misc_feature (20)..(21): Phosphorothioate linkage
  modified_base (21)..(21): 2' O-methyl modified nucleoside
cuccgcaaagguggcuacauu

SEQ ID NO: 11171 - RNA, 21 nt, Artificial Sequence
  Description of Artificial Sequence: Synthetic oligonucleotide
  modified_base (1)..(1): 2' fluoro-modified nucleoside
  misc_feature (1)..(2): Phosphorothioate linkage
  modified_base (2)..(2): 2' O-methyl modified nucleoside
  misc_feature (2)..(3): Phosphorothioate linkage
  modified_base (3)..(3): 2' fluoro-modified nucleoside
  modified_base (4)..(4): 2' O-methyl modified nucleoside
  modified_base (5)..(5): 2' fluoro-modified nucleoside
  modified_base (6)..(6): 2' O-methyl modified nucleoside
  modified_base (7)..(7): 2' fluoro-modified nucleoside
  modified_base (8)..(8): 2' fluoro-modified nucleoside
  modified_base (9)..(9): 2' fluoro-modified nucleoside
  modified_base (10)..(10): 2' O-methyl modified nucleoside
  modified_base (11)..(11): 2' fluoro-modified nucleoside
  modified_base (12)..(12): 2' O-methyl modified nucleoside
  modified_base (13)..(13): 2' fluoro-modified nucleoside
  modified_base (14)..(14): 2' O-methyl modified nucleoside
  modified_base (15)..(15): 2' fluoro-modified nucleoside
  modified_base (16)..(16): 2' O-methyl modified nucleoside
  modified_base (17)..(17): 2' fluoro-modified nucleoside
  modified_base (18)..(18): 2' O-methyl modified nucleoside
  modified_base (19)..(19): 2' fluoro-modified nucleoside
  misc_feature (19)..(20): Phosphorothioate linkage
  modified_base (20)..(20): 2' O-methyl modified nucleoside
  misc_feature (20)..(21): Phosphorothioate linkage
  modified_base (21)..(21): 2' O-methyl modified nucleoside
uccgcaaagguggcuacuauu

SEQ ID NO: 11172 - RNA, 21 nt, Artificial Sequence
  Description of Artificial Sequence: Synthetic oligonucleotide
  modified_base (1)..(1): 2' fluoro-modified nucleoside
  misc_feature (1)..(2): Phosphorothioate linkage
  modified_base (2)..(2): 2' O-methyl modified nucleoside
  misc_feature (2)..(3): Phosphorothioate linkage
  modified_base (3)..(3): 2' fluoro-modified nucleoside
  modified_base (4)..(4): 2' O-methyl modified nucleoside
  modified_base (5)..(5): 2' fluoro-modified nucleoside
  modified_base (6)..(6): 2' O-methyl modified nucleoside
  modified_base (7)..(7): 2' fluoro-modified nucleoside
  modified_base (8)..(8): 2' fluoro-modified nucleoside
  modified_base (9)..(9): 2' fluoro-modified nucleoside
  modified_base (10)..(10): 2' O-methyl modified nucleoside
  modified_base (11)..(11): 2' fluoro-modified nucleoside
  modified_base (12)..(12): 2' O-methyl modified nucleoside
  modified_base (13)..(13): 2' fluoro-modified nucleoside
  modified_base (14)..(14): 2' O-methyl modified nucleoside
  modified_base (15)..(15): 2' fluoro-modified nucleoside
  modified_base (16)..(16): 2' O-methyl modified nucleoside
  modified_base (17)..(17): 2' fluoro-modified nucleoside
  modified_base (18)..(18): 2' O-methyl modified nucleoside
  modified_base (19)..(19): 2' fluoro-modified nucleoside
  misc_feature (19)..(20): Phosphorothioate linkage
  modified_base (20)..(20): 2' O-methyl modified nucleoside
  misc_feature (20)..(21): Phosphorothioate linkage
  modified_base (21)..(21): 2' O-methyl modified nucleoside
caaagguggcuacugguaauu

SEQ ID NO: 11173 - RNA, 21 nt, Artificial Sequence
  Description of Artificial Sequence: Synthetic oligonucleotide
  modified_base (1)..(1): 2' fluoro-modified nucleoside
  misc_feature (1)..(2): Phosphorothioate linkage
  modified_base (2)..(2): 2' O-methyl modified nucleoside
  misc_feature (2)..(3): Phosphorothioate linkage
  modified_base (3)..(3): 2' fluoro-modified nucleoside
  modified_base (4)..(4): 2' O-methyl modified nucleoside
  modified_base (5)..(5): 2' fluoro-modified nucleoside
  modified_base (6)..(6): 2' O-methyl modified nucleoside
  modified_base (7)..(7): 2' fluoro-modified nucleoside
  modified_base (8)..(8): 2' fluoro-modified nucleoside
  modified_base (9)..(9): 2' fluoro-modified nucleoside
  modified_base (10)..(10): 2' O-methyl modified nucleoside
  modified_base (11)..(11): 2' fluoro-modified nucleoside
  modified_base (12)..(12): 2' O-methyl modified nucleoside
  modified_base (13)..(13): 2' fluoro-modified nucleoside
  modified_base (14)..(14): 2' O-methyl modified nucleoside
  modified_base (15)..(15): 2' fluoro-modified nucleoside
  modified_base (16)..(16): 2' O-methyl modified nucleoside
  modified_base (17)..(17): 2' fluoro-modified nucleoside
  modified_base (18)..(18): 2' O-methyl modified nucleoside
  modified_base (19)..(19): 2' fluoro-modified nucleoside
  misc_feature (19)..(20): Phosphorothioate linkage
  modified_base (20)..(20): 2' O-methyl modified nucleoside
  misc_feature (20)..(21): Phosphorothioate linkage
  modified_base (21)..(21): 2' O-methyl modified nucleoside
aagguggcuacugguacaauu

SEQ ID NO: 11174 - RNA, 21 nt, Artificial Sequence
  Description of Artificial Sequence: Synthetic oligonucleotide
  modified_base (1)..(1): 2' fluoro-modified nucleoside
  misc_feature (1)..(2): Phosphorothioate linkage
  modified_base (2)..(2): 2' O-methyl modified nucleoside
  misc_feature (2)..(3): Phosphorothioate linkage
  modified_base (3)..(3): 2' fluoro-modified nucleoside
  modified_base (4)..(4): 2' O-methyl modified nucleoside
  modified_base (5)..(5): 2' fluoro-modified nucleoside
  modified_base (6)..(6): 2' O-methyl modified nucleoside
  modified_base (7)..(7): 2' fluoro-modified nucleoside
  modified_base (8)..(8): 2' fluoro-modified nucleoside
  modified_base (9)..(9): 2' fluoro-modified nucleoside
  modified_base (10)..(10): 2' O-methyl modified nucleoside
  modified_base (11)..(11): 2' fluoro-modified nucleoside
  modified_base (12)..(12): 2' O-methyl modified nucleoside
  modified_base (13)..(13): 2' fluoro-modified nucleoside
  modified_base (14)..(14): 2' O-methyl modified nucleoside
  modified_base (15)..(15): 2' fluoro-modified nucleoside
  modified_base (16)..(16): 2' O-methyl modified nucleoside
  modified_base (17)..(17): 2' fluoro-modified nucleoside
  modified_base (18)..(18): 2' O-methyl modified nucleoside
  modified_base (19)..(19): 2' fluoro-modified nucleoside
  misc_feature (19)..(20): Phosphorothioate linkage
  modified_base (20)..(20): 2' O-methyl modified nucleoside
  misc_feature (20)..(21): Phosphorothioate linkage
  modified_base (21)..(21): 2' O-methyl modified nucleoside
guggcuacugguacaacuauu

SEQ ID NO: 11175 - RNA, 21 nt, Artificial Sequence
  Description of Artificial Sequence: Synthetic oligonucleotide
  modified_base (1)..(1): 2' fluoro-modified nucleoside
  misc_feature (1)..(2): Phosphorothioate linkage
  modified_base (2)..(2): 2' O-methyl modified nucleoside
  misc_feature (2)..(3): Phosphorothioate linkage
  modified_base (3)..(3): 2' fluoro-modified nucleoside
  modified_base (4)..(4): 2' O-methyl modified nucleoside
  modified_base (5)..(5): 2' fluoro-modified nucleoside
  modified_base (6)..(6): 2' O-methyl modified nucleoside
  modified_base (7)..(7): 2' fluoro-modified nucleoside
  modified_base (8)..(8): 2' fluoro-modified nucleoside
  modified_base (9)..(9): 2' fluoro-modified nucleoside
  modified_base (10)..(10): 2' O-methyl modified nucleoside
  modified_base (11)..(11): 2' fluoro-modified nucleoside
  modified_base (12)..(12): 2' O-methyl modified nucleoside
  modified_base (13)..(13): 2' fluoro-modified nucleoside
  modified_base (14)..(14): 2' O-methyl modified nucleoside
  modified_base (15)..(15): 2' fluoro-modified nucleoside
  modified_base (16)..(16): 2' O-methyl modified nucleoside
  modified_base (17)..(17): 2' fluoro-modified nucleoside
  modified_base (18)..(18): 2' O-methyl modified nucleoside
  modified_base (19)..(19): 2' fluoro-modified nucleoside
  misc_feature (19)..(20): Phosphorothioate linkage
  modified_base (20)..(20): 2' O-methyl modified nucleoside
  misc_feature (20)..(21): Phosphorothioate linkage
  modified_base (21)..(21): 2' O-methyl modified nucleoside
ugguacaacugcugcacaauu

SEQ ID NO: 11176 - RNA, 21 nt, Artificial Sequence
  Description of Artificial Sequence: Synthetic oligonucleotide
  modified_base (1)..(1): 2' fluoro-modified nucleoside
  misc_feature (1)..(2): Phosphorothioate linkage
  modified_base (2)..(2): 2' O-methyl modified nucleoside
  misc_feature (2)..(3): Phosphorothioate linkage
  modified_base (3)..(3): 2' fluoro-modified nucleoside
  modified_base (4)..(4): 2' O-methyl modified nucleoside
  modified_base (5)..(5): 2' fluoro-modified nucleoside
  modified_base (6)..(6): 2' O-methyl modified nucleoside
  modified_base (7)..(7): 2' fluoro-modified nucleoside
  modified_base (8)..(8): 2' fluoro-modified nucleoside
  modified_base (9)..(9): 2' fluoro-modified nucleoside
  modified_base (10)..(10): 2' O-methyl modified nucleoside
  modified_base (11)..(11): 2' fluoro-modified nucleoside
  modified_base (12)..(12): 2' O-methyl modified nucleoside
  modified_base (13)..(13): 2' fluoro-modified nucleoside
  modified_base (14)..(14): 2' O-methyl modified nucleoside
  modified_base (15)..(15): 2' fluoro-modified nucleoside
  modified_base (16)..(16): 2' O-methyl modified nucleoside
  modified_base (17)..(17): 2' fluoro-modified nucleoside
  modified_base (18)..(18): 2' O-methyl modified nucleoside
  modified_base (19)..(19): 2' fluoro-modified nucleoside
  misc_feature (19)..(20): Phosphorothioate linkage
  modified_base (20)..(20): 2' O-methyl modified nucleoside
  misc_feature (20)..(21): Phosphorothioate linkage
  modified_base (21)..(21): 2' O-methyl modified nucleoside
guacaacugcugcacagaauu

SEQ ID NO: 11177 - RNA, 21 nt, Artificial Sequence
  Description of Artificial Sequence: Synthetic oligonucleotide
  modified_base (1)..(1): 2' fluoro-modified nucleoside
  misc_feature (1)..(2): Phosphorothioate linkage
  modified_base (2)..(2): 2' O-methyl modified nucleoside
  misc_feature (2)..(3): Phosphorothioate linkage
  modified_base (3)..(3): 2' fluoro-modified nucleoside
  modified_base (4)..(4): 2' O-methyl modified nucleoside
  modified_base (5)..(5): 2' fluoro-modified nucleoside
  modified_base (6)..(6): 2' O-methyl modified nucleoside
  modified_base (7)..(7): 2' fluoro-modified nucleoside
  modified_base (8)..(8): 2' fluoro-modified nucleoside
  modified_base (9)..(9): 2' fluoro-modified nucleoside
  modified_base (10)..(10): 2' O-methyl modified nucleoside
  modified_base (11)..(11): 2' fluoro-modified nucleoside
  modified_base (12)..(12): 2' O-methyl modified nucleoside
  modified_base (13)..(13): 2' fluoro-modified nucleoside
  modified_base (14)..(14): 2' O-methyl modified nucleoside
  modified_base (15)..(15): 2' fluoro-modified nucleoside
  modified_base (16)..(16): 2' O-methyl modified nucleoside
  modified_base (17)..(17): 2' fluoro-modified nucleoside
  modified_base (18)..(18): 2' O-methyl modified nucleoside
  modified_base (19)..(19): 2' fluoro-modified nucleoside
  misc_feature (19)..(20): Phosphorothioate linkage
  modified_base (20)..(20): 2' O-methyl modified nucleoside
  misc_feature (20)..(21): Phosphorothioate linkage
  modified_base (21)..(21): 2' O-methyl modified nucleoside
ccucaauggaguguacuaauu

SEQ ID NO: 11178 - RNA, 21 nt, Artificial Sequence
  Description of Artificial Sequence: Synthetic oligonucleotide
  modified_base (1)..(1): 2' fluoro-modified nucleoside
  misc_feature (1)..(2): Phosphorothioate linkage
  modified_base (2)..(2): 2' O-methyl modified nucleoside
  misc_feature (2)..(3): Phosphorothioate linkage
  modified_base (3)..(3): 2' fluoro-modified nucleoside
  modified_base (4)..(4): 2' O-methyl modified nucleoside
  modified_base (5)..(5): 2' fluoro-modified nucleoside
  modified_base (6)..(6): 2' O-methyl modified nucleoside
  modified_base (7)..(7): 2' fluoro-modified nucleoside
  modified_base (8)..(8): 2' fluoro-modified nucleoside
  modified_base (9)..(9): 2' fluoro-modified nucleoside
  modified_base (10)..(10): 2' O-methyl modified nucleoside
  modified_base (11)..(11): 2' fluoro-modified nucleoside
  modified_base (12)..(12): 2' O-methyl modified nucleoside
  modified_base (13)..(13): 2' fluoro-modified nucleoside
  modified_base (14)..(14): 2' O-methyl modified nucleoside
  modified_base (15)..(15): 2' fluoro-modified nucleoside
  modified_base (16)..(16): 2' O-methyl modified nucleoside
  modified_base (17)..(17): 2' fluoro-modified nucleoside
  modified_base (18)..(18): 2' O-methyl modified nucleoside
  modified_base (19)..(19): 2' fluoro-modified nucleoside
  misc_feature (19)..(20): Phosphorothioate linkage
  modified_base (20)..(20): 2' O-methyl modified nucleoside
  misc_feature (20)..(21): Phosphorothioate linkage
  modified_base (21)..(21): 2' O-methyl modified nucleoside
cucaauggaguguacuacauu

SEQ ID NO: 11179 - RNA, 21 nt, Artificial Sequence
  Description of Artificial Sequence: Synthetic oligonucleotide
  modified_base (1)..(1): 2' fluoro-modified nucleoside
  misc_feature (1)..(2): Phosphorothioate linkage
  modified_base (2)..(2): 2' O-methyl modified nucleoside
  misc_feature (2)..(3): Phosphorothioate linkage
  modified_base (3)..(3): 2' fluoro-modified nucleoside
  modified_base (4)..(4): 2' O-methyl modified nucleoside
  modified_base (5)..(5): 2' fluoro-modified nucleoside
  modified_base (6)..(6): 2' O-methyl modified nucleoside
  modified_base (7)..(7): 2' fluoro-modified nucleoside
  modified_base (8)..(8): 2' fluoro-modified nucleoside
  modified_base (9)..(9): 2' fluoro-modified nucleoside
  modified_base (10)..(10): 2' O-methyl modified nucleoside
  modified_base (11)..(11): 2' fluoro-modified nucleoside
  modified_base (12)..(12): 2' O-methyl modified nucleoside
  modified_base (13)..(13): 2' fluoro-modified nucleoside
  modified_base (14)..(14): 2' O-methyl modified nucleoside
  modified_base (15)..(15): 2' fluoro-modified nucleoside
  modified_base (16)..(16): 2' O-methyl modified nucleoside
  modified_base (17)..(17): 2' fluoro-modified nucleoside
  modified_base (18)..(18): 2' O-methyl modified nucleoside
  modified_base (19)..(19): 2' fluoro-modified nucleoside
  misc_feature (19)..(20): Phosphorothioate linkage
  modified_base (20)..(20): 2' O-methyl modified nucleoside
  misc_feature (20)..(21): Phosphorothioate linkage
  modified_base (21)..(21): 2' O-methyl modified nucleoside
ucaauggaguguacuaccauu

SEQ ID NO: 11180 - RNA, 21 nt, Artificial Sequence
  Description of Artificial Sequence: Synthetic oligonucleotide
  modified_base (1)..(1): 2' fluoro-modified nucleoside
  misc_feature (1)..(2): Phosphorothioate linkage
  modified_base (2)..(2): 2' O-methyl modified nucleoside
  misc_feature (2)..(3): Phosphorothioate linkage
  modified_base (3)..(3): 2' fluoro-modified nucleoside
  modified_base (4)..(4): 2' O-methyl modified nucleoside
  modified_base (5)..(5): 2' fluoro-modified nucleoside
  modified_base (6)..(6): 2' O-methyl modified nucleoside
  modified_base (7)..(7): 2' fluoro-modified nucleoside
  modified_base (8)..(8): 2' fluoro-modified nucleoside
  modified_base (9)..(9): 2' fluoro-modified nucleoside
  modified_base (10)..(10): 2' O-methyl modified nucleoside
  modified_base (11)..(11): 2' fluoro-modified nucleoside
  modified_base (12)..(12): 2' O-methyl modified nucleoside
  modified_base (13)..(13): 2' fluoro-modified nucleoside
  modified_base (14)..(14): 2' O-methyl modified nucleoside
  modified_base (15)..(15): 2' fluoro-modified nucleoside
  modified_base (16)..(16): 2' O-methyl modified nucleoside
  modified_base (17)..(17): 2' fluoro-modified nucleoside
  modified_base (18)..(18): 2' O-methyl modified nucleoside
  modified_base (19)..(19): 2' fluoro-modified nucleoside
  misc_feature (19)..(20): Phosphorothioate linkage
  modified_base (20)..(20): 2' O-methyl modified nucleoside
  misc_feature (20)..(21): Phosphorothioate linkage
  modified_base (21)..(21): 2' O-methyl modified nucleoside
caauggaguguacuaccgauu

SEQ ID NO: 11181 - RNA, 21 nt, Artificial Sequence
  Description of Artificial Sequence: Synthetic oligonucleotide
  modified_base (1)..(1): 2' fluoro-modified nucleoside
  misc_feature (1)..(2): Phosphorothioate linkage
  modified_base (2)..(2): 2' O-methyl modified nucleoside
  misc_feature (2)..(3): Phosphorothioate linkage
  modified_base (3)..(3): 2' fluoro-modified nucleoside
  modified_base (4)..(4): 2' O-methyl modified nucleoside
  modified_base (5)..(5): 2' fluoro-modified nucleoside
  modified_base (6)..(6): 2' O-methyl modified nucleoside
  modified_base (7)..(7): 2' fluoro-modified nucleoside
  modified_base (8)..(8): 2' fluoro-modified nucleoside
  modified_base (9)..(9): 2' fluoro-modified nucleoside
  modified_base (10)..(10): 2' O-methyl modified nucleoside
  modified_base (11)..(11): 2' fluoro-modified nucleoside
  modified_base (12)..(12): 2' O-methyl modified nucleoside
  modified_base (13)..(13): 2' fluoro-modified nucleoside
  modified_base (14)..(14): 2' O-methyl modified nucleoside
  modified_base (15)..(15): 2' fluoro-modified nucleoside
  modified_base (16)..(16): 2' O-methyl modified nucleoside
  modified_base (17)..(17): 2' fluoro-modified nucleoside
  modified_base (18)..(18): 2' O-methyl modified nucleoside
  modified_base (19)..(19): 2' fluoro-modified nucleoside
  misc_feature (19)..(20): Phosphorothioate linkage
  modified_base (20)..(20): 2' O-methyl modified nucleoside
  misc_feature (20)..(21): Phosphorothioate linkage
  modified_base (21)..(21): 2' O-methyl modified nucleoside
uggcauggaucuaccuacauu

SEQ ID NO: 11182 - RNA, 21 nt, Artificial Sequence
  Description of Artificial Sequence: Synthetic oligonucleotide
  modified_base (1)..(1): 2' fluoro-modified nucleoside
  misc_feature (1)..(2): Phosphorothioate linkage
  modified_base (2)..(2): 2' O-methyl modified nucleoside
  misc_feature (2)..(3): Phosphorothioate linkage
  modified_base (3)..(3): 2' fluoro-modified nucleoside
  modified_base (4)..(4): 2' O-methyl modified nucleoside
  modified_base (5)..(5): 2' fluoro-modified nucleoside
  modified_base (6)..(6): 2' O-methyl modified nucleoside
  modified_base (7)..(7): 2' fluoro-modified nucleoside
  modified_base (8)..(8): 2' fluoro-modified nucleoside
  modified_base (9)..(9): 2' fluoro-modified nucleoside
  modified_base (10)..(10): 2' O-methyl modified nucleoside
  modified_base (11)..(11): 2' fluoro-modified nucleoside
  modified_base (12)..(12): 2' O-methyl modified nucleoside
  modified_base (13)..(13): 2' fluoro-modified nucleoside
  modified_base (14)..(14): 2' O-methyl modified nucleoside
  modified_base (15)..(15): 2' fluoro-modified nucleoside
  modified_base (16)..(16): 2' O-methyl modified nucleoside
  modified_base (17)..(17): 2' fluoro-modified nucleoside
  modified_base (18)..(18): 2' O-methyl modified nucleoside
  modified_base (19)..(19): 2' fluoro-modified nucleoside
  misc_feature (19)..(20): Phosphorothioate linkage
  modified_base (20)..(20): 2' O-methyl modified nucleoside
  misc_feature (20)..(21): Phosphorothioate linkage
  modified_base (21)..(21): 2' O-methyl modified nucleoside
ggcauggaucuaccuacuauu

SEQ ID NO: 11183 - RNA, 21 nt, Artificial Sequence
  Description of Artificial Sequence: Synthetic oligonucleotide
  modified_base (1)..(1): 2' fluoro-modified nucleoside
  misc_feature (1)..(2): Phosphorothioate linkage
  modified_base (2)..(2): 2' O-methyl modified nucleoside
  misc_feature (2)..(3): Phosphorothioate linkage
  modified_base (3)..(3): 2' fluoro-modified nucleoside
  modified_base (4)..(4): 2' O-methyl modified nucleoside
  modified_base (5)..(5): 2' fluoro-modified nucleoside
  modified_base (6)..(6): 2' O-methyl modified nucleoside
  modified_base (7)..(7): 2' fluoro-modified nucleoside
  modified_base (8)..(8): 2' fluoro-modified nucleoside
  modified_base (9)..(9): 2' fluoro-modified nucleoside
  modified_base (10)..(10): 2' O-methyl modified nucleoside
  modified_base (11)..(11): 2' fluoro-modified nucleoside
  modified_base (12)..(12): 2' O-methyl modified nucleoside
  modified_base (13)..(13): 2' fluoro-modified nucleoside
  modified_base (14)..(14): 2' O-methyl modified nucleoside
  modified_base (15)..(15): 2' fluoro-modified nucleoside
  modified_base (16)..(16): 2' O-methyl modified nucleoside
  modified_base (17)..(17): 2' fluoro-modified nucleoside
  modified_base (18)..(18): 2' O-methyl modified nucleoside
  modified_base (19)..(19): 2' fluoro-modified nucleoside
  misc_feature (19)..(20): Phosphorothioate linkage
  modified_base (20)..(20): 2' O-methyl modified nucleoside
  misc_feature (20)..(21): Phosphorothioate linkage
  modified_base (21)..(21): 2' O-methyl modified nucleoside
cauggaucuaccuacuccauu

SEQ ID NO: 11184 - RNA, 21 nt, Artificial Sequence
  Description of Artificial Sequence: Synthetic oligonucleotide
  modified_base (1)..(1): 2' fluoro-modified nucleoside
  misc_feature (1)..(2): Phosphorothioate linkage
  modified_base (2)..(2): 2' O-methyl modified nucleoside
  misc_feature (2)..(3): Phosphorothioate linkage
  modified_base (3)..(3): 2' fluoro-modified nucleoside
  modified_base (4)..(4): 2' O-methyl modified nucleoside
  modified_base (5)..(5): 2' fluoro-modified nucleoside
  modified_base (6)..(6): 2' O-methyl modified nucleoside
  modified_base (7)..(7): 2' fluoro-modified nucleoside
  modified_base (8)..(8): 2' fluoro-modified nucleoside
  modified_base (9)..(9): 2' fluoro-modified nucleoside
  modified_base (10)..(10): 2' O-methyl modified nucleoside
  modified_base (11)..(11): 2' fluoro-modified nucleoside
  modified_base (12)..(12): 2' O-methyl modified nucleoside
  modified_base (13)..(13): 2' fluoro-modified nucleoside
  modified_base (14)..(14): 2' O-methyl modified nucleoside
  modified_base (15)..(15): 2' fluoro-modified nucleoside
  modified_base (16)..(16): 2' O-methyl modified nucleoside
  modified_base (17)..(17): 2' fluoro-modified nucleoside
  modified_base (18)..(18): 2' O-methyl modified nucleoside
  modified_base (19)..(19): 2' fluoro-modified nucleoside
  misc_feature (19)..(20): Phosphorothioate linkage
  modified_base (20)..(20): 2' O-methyl modified nucleoside
  misc_feature (20)..(21): Phosphorothioate linkage
  modified_base (21)..(21): 2' O-methyl modified nucleoside
auggaucuaccuacucccauu

SEQ ID NO: 11185 - RNA, 21 nt, Artificial Sequence
  Description of Artificial Sequence: Synthetic oligonucleotide
  modified_base (1)..(1): 2' fluoro-modified nucleoside
  misc_feature (1)..(2): Phosphorothioate linkage
  modified_base (2)..(2): 2' O-methyl modified nucleoside
  misc_feature (2)..(3): Phosphorothioate linkage
  modified_base (3)..(3): 2' fluoro-modified nucleoside
  modified_base (4)..(4): 2' O-methyl modified nucleoside
  modified_base (5)..(5): 2' fluoro-modified nucleoside
  modified_base (6)..(6): 2' O-methyl modified nucleoside
  modified_base (7)..(7): 2' fluoro-modified nucleoside
  modified_base (8)..(8): 2' fluoro-modified nucleoside
  modified_base (9)..(9): 2' fluoro-modified nucleoside
  modified_base (10)..(10): 2' O-methyl modified nucleoside
  modified_base (11)..(11): 2' fluoro-modified nucleoside
  modified_base (12)..(12): 2' O-methyl modified nucleoside
  modified_base (13)..(13): 2' fluoro-modified nucleoside
  modified_base (14)..(14): 2' O-methyl modified nucleoside
  modified_base (15)..(15): 2' fluoro-modified nucleoside
  modified_base (16)..(16): 2' O-methyl modified nucleoside
  modified_base (17)..(17): 2' fluoro-modified nucleoside
  modified_base (18)..(18): 2' O-methyl modified nucleoside
  modified_base (19)..(19): 2' fluoro-modified nucleoside
  misc_feature (19)..(20): Phosphorothioate linkage
  modified_base (20)..(20): 2' O-methyl modified nucleoside
  misc_feature (20)..(21): Phosphorothioate linkage
  modified_base (21)..(21): 2' O-methyl modified nucleoside
cuuaaaaggaggcugccgauu

SEQ ID NO: 11186 - RNA, 21 nt, Artificial Sequence
  Description of Artificial Sequence: Synthetic oligonucleotide
  modified_base (1)..(1): 2' fluoro-modified nucleoside
  misc_feature (1)..(2): Phosphorothioate linkage
  modified_base (2)..(2): 2' O-methyl modified nucleoside
  misc_feature (2)..(3): Phosphorothioate linkage
  modified_base (3)..(3): 2' fluoro-modified nucleoside
  modified_base (4)..(4): 2' O-methyl modified nucleoside
  modified_base (5)..(5): 2' fluoro-modified nucleoside
  modified_base (6)..(6): 2' O-methyl modified nucleoside
  modified_base (7)..(7): 2' fluoro-modified nucleoside
  modified_base (8)..(8): 2' fluoro-modified nucleoside
  modified_base (9)..(9): 2' fluoro-modified nucleoside
  modified_base (10)..(10): 2' O-methyl modified nucleoside
  modified_base (11)..(11): 2' fluoro-modified nucleoside
  modified_base (12)..(12): 2' O-methyl modified nucleoside
  modified_base (13)..(13): 2' fluoro-modified nucleoside
  modified_base (14)..(14): 2' O-methyl modified nucleoside
  modified_base (15)..(15): 2' fluoro-modified nucleoside
  modified_base (16)..(16): 2' O-methyl modified nucleoside
  modified_base (17)..(17): 2' fluoro-modified nucleoside
  modified_base (18)..(18): 2' O-methyl modified nucleoside
  modified_base (19)..(19): 2' fluoro-modified nucleoside
  misc_feature (19)..(20): Phosphorothioate linkage
  modified_base (20)..(20): 2' O-methyl modified nucleoside
  misc_feature (20)..(21): Phosphorothioate linkage
  modified_base (21)..(21): 2' O-methyl modified nucleoside
auauguaccaaggauguuauu

SEQ ID NO: 11187 - RNA, 21 nt, Artificial Sequence
  Description of Artificial Sequence: Synthetic oligonucleotide
  modified_base (1)..(1): 2' fluoro-modified nucleoside
  misc_feature (1)..(2): Phosphorothioate linkage
  modified_base (2)..(2): 2' O-methyl modified nucleoside
  misc_feature (2)..(3): Phosphorothioate linkage
  modified_base (3)..(3): 2' fluoro-modified nucleoside
  modified_base (4)..(4): 2' O-methyl modified nucleoside
  modified_base (5)..(5): 2' fluoro-modified nucleoside
  modified_base (6)..(6): 2' O-methyl modified nucleoside
  modified_base (7)..(7): 2' fluoro-modified nucleoside
  modified_base (8)..(8): 2' fluoro-modified nucleoside
  modified_base (9)..(9): 2' fluoro-modified nucleoside
  modified_base (10)..(10): 2' O-methyl modified nucleoside
  modified_base (11)..(11): 2' fluoro-modified nucleoside
  modified_base (12)..(12): 2' O-methyl modified nucleoside
  modified_base (13)..(13): 2' fluoro-modified nucleoside
  modified_base (14)..(14): 2' O-methyl modified nucleoside
  modified_base (15)..(15): 2' fluoro-modified nucleoside
  modified_base (16)..(16): 2' O-methyl modified nucleoside
  modified_base (17)..(17): 2' fluoro-modified nucleoside
  modified_base (18)..(18): 2' O-methyl modified nucleoside
  modified_base (19)..(19): 2' fluoro-modified nucleoside
  misc_feature (19)..(20): Phosphorothioate linkage
  modified_base (20)..(20): 2' O-methyl modified nucleoside
  misc_feature (20)..(21): Phosphorothioate linkage
  modified_base (21)..(21): 2' O-methyl modified nucleoside
uguaccaaggauguuacaauu

SEQ ID NO: 11188 - RNA, 21 nt, Artificial Sequence
  Description of Artificial Sequence: Synthetic oligonucleotide
  modified_base (1)..(1): 2' fluoro-modified nucleoside
  misc_feature (1)..(2): Phosphorothioate linkage
  modified_base (2)..(2): 2' O-methyl modified nucleoside
  misc_feature (2)..(3): Phosphorothioate linkage
  modified_base (3)..(3): 2' fluoro-modified nucleoside
  modified_base (4)..(4): 2' O-methyl modified nucleoside
  modified_base (5)..(5): 2' fluoro-modified nucleoside
  modified_base (6)..(6): 2' O-methyl modified nucleoside
  modified_base (7)..(7): 2' fluoro-modified nucleoside
  modified_base (8)..(8): 2' fluoro-modified nucleoside
  modified_base (9)..(9): 2' fluoro-modified nucleoside
  modified_base (10)..(10): 2' O-methyl modified nucleoside
  modified_base (11)..(11): 2' fluoro-modified nucleoside
  modified_base (12)..(12): 2' O-methyl modified nucleoside
  modified_base (13)..(13): 2' fluoro-modified nucleoside
  modified_base (14)..(14): 2' O-methyl modified nucleoside
  modified_base (15)..(15): 2' fluoro-modified nucleoside
  modified_base (16)..(16): 2' O-methyl modified nucleoside
  modified_base (17)..(17): 2' fluoro-modified nucleoside
  modified_base (18)..(18): 2' O-methyl modified nucleoside
  modified_base (19)..(19): 2' fluoro-modified nucleoside
  misc_feature (19)..(20): Phosphorothioate linkage
  modified_base (20)..(20): 2' O-methyl modified nucleoside
  misc_feature (20)..(21): Phosphorothioate linkage
  modified_base (21)..(21): 2' O-methyl modified nucleoside
aggauguuacaguaaacaauu

SEQ ID NO: 11189 - RNA, 21 nt, Artificial Sequence
  Description of Artificial Sequence: Synthetic oligonucleotide
  modified_base (1)..(1): 2' fluoro-modified nucleoside
  misc_feature (1)..(2): Phosphorothioate linkage
  modified_base (2)..(2): 2' O-methyl modified nucleoside
  misc_feature (2)..(3): Phosphorothioate linkage
  modified_base (3)..(3): 2' fluoro-modified nucleoside
  modified_base (4)..(4): 2' O-methyl modified nucleoside
  modified_base (5)..(5): 2' fluoro-modified nucleoside
  modified_base (6)..(6): 2' O-methyl modified nucleoside
  modified_base (7)..(7): 2' fluoro-modified nucleoside
  modified_base (8)..(8): 2' fluoro-modified nucleoside
  modified_base (9)..(9): 2' fluoro-modified nucleoside
  modified_base (10)..(10): 2' O-methyl modified nucleoside
  modified_base (11)..(11): 2' fluoro-modified nucleoside
  modified_base (12)..(12): 2' O-methyl modified nucleoside
  modified_base (13)..(13): 2' fluoro-modified nucleoside
  modified_base (14)..(14): 2' O-methyl modified nucleoside
  modified_base (15)..(15): 2' fluoro-modified nucleoside
  modified_base (16)..(16): 2' O-methyl modified nucleoside
  modified_base (17)..(17): 2' fluoro-modified nucleoside
  modified_base (18)..(18): 2' O-methyl modified nucleoside
  modified_base (19)..(19): 2' fluoro-modified nucleoside
  misc_feature (19)..(20): Phosphorothioate linkage
  modified_base (20)..(20): 2' O-methyl modified nucleoside
  misc_feature (20)..(21): Phosphorothioate linkage
  modified_base (21)..(21): 2' O-methyl modified nucleoside
ggauguuacaguaaacagauu

SEQ ID NO: 11190 - RNA, 21 nt, Artificial Sequence
  Description of Artificial Sequence: Synthetic oligonucleotide
  modified_base (1)..(1): 2' fluoro-modified nucleoside
  misc_feature (1)..(2): Phosphorothioate linkage
  modified_base (2)..(2): 2' O-methyl modified nucleoside
  misc_feature (2)..(3): Phosphorothioate linkage
  modified_base (3)..(3): 2' fluoro-modified nucleoside
  modified_base (4)..(4): 2' O-methyl modified nucleoside
  modified_base (5)..(5): 2' fluoro-modified nucleoside
  modified_base (6)..(6): 2' O-methyl modified nucleoside
  modified_base (7)..(7): 2' fluoro-modified nucleoside
  modified_base (8)..(8): 2' fluoro-modified nucleoside
  modified_base (9)..(9): 2' fluoro-modified nucleoside
  modified_base (10)..(10): 2' O-methyl modified nucleoside
  modified_base (11)..(11): 2' fluoro-modified nucleoside
  modified_base (12)..(12): 2' O-methyl modified nucleoside
  modified_base (13)..(13): 2' fluoro-modified nucleoside
  modified_base (14)..(14): 2' O-methyl modified nucleoside
  modified_base (15)..(15): 2' fluoro-modified nucleoside
  modified_base (16)..(16): 2' O-methyl modified nucleoside
  modified_base (17)..(17): 2' fluoro-modified nucleoside
  modified_base (18)..(18): 2' O-methyl modified nucleoside
  modified_base (19)..(19): 2' fluoro-modified nucleoside
  misc_feature (19)..(20): Phosphorothioate linkage
  modified_base (20)..(20): 2' O-methyl modified nucleoside
  misc_feature (20)..(21): Phosphorothioate linkage
  modified_base (21)..(21): 2' O-methyl modified nucleoside
uuaaacccacuggguccuauu

SEQ ID NO: 11191 - RNA, 21 nt, Artificial Sequence
  Description of Artificial Sequence: Synthetic oligonucleotide
  modified_base (1)..(1): 2' fluoro-modified nucleoside
  misc_feature (1)..(2): Phosphorothioate linkage
  modified_base (2)..(2): 2' O-methyl modified nucleoside
  misc_feature (2)..(3): Phosphorothioate linkage
  modified_base (3)..(3): 2' fluoro-modified nucleoside
  modified_base (4)..(4): 2' O-methyl modified nucleoside
  modified_base (5)..(5): 2' fluoro-modified nucleoside
  modified_base (6)..(6): 2' O-methyl modified nucleoside
  modified_base (7)..(7): 2' fluoro-modified nucleoside
  modified_base (8)..(8): 2' fluoro-modified nucleoside
  modified_base (9)..(9): 2' fluoro-modified nucleoside
  modified_base (10)..(10): 2' O-methyl modified nucleoside
  modified_base (11)..(11): 2' fluoro-modified nucleoside
  modified_base (12)..(12): 2' O-methyl modified nucleoside
  modified_base (13)..(13): 2' fluoro-modified nucleoside
  modified_base (14)..(14): 2' O-methyl modified nucleoside
  modified_base (15)..(15): 2' fluoro-modified nucleoside
  modified_base (16)..(16): 2' O-methyl modified nucleoside
  modified_base (17)..(17): 2' fluoro-modified nucleoside
  modified_base (18)..(18): 2' O-methyl modified nucleoside
  modified_base (19)..(19): 2' fluoro-modified nucleoside
  misc_feature (19)..(20): Phosphorothioate linkage
  modified_base (20)..(20): 2' O-methyl modified nucleoside
  misc_feature (20)..(21): Phosphorothioate linkage
  modified_base (21)..(21): 2' O-methyl modified nucleoside
cccaagaucccugacauaauu

SEQ ID NO: 11192 - RNA, 21 nt, Artificial Sequence
  Description of Artificial Sequence: Synthetic oligonucleotide
  modified_base (1)..(1): 2' fluoro-modified nucleoside
  misc_feature (1)..(2): Phosphorothioate linkage
  modified_base (2)..(2): 2' O-methyl modified nucleoside
  misc_feature (2)..(3): Phosphorothioate linkage
  modified_base (3)..(3): 2' fluoro-modified nucleoside
  modified_base (4)..(4): 2' O-methyl modified nucleoside
  modified_base (5)..(5): 2' fluoro-modified nucleoside
  modified_base (6)..(6): 2' O-methyl modified nucleoside
  modified_base (7)..(7): 2' fluoro-modified nucleoside
  modified_base (8)..(8): 2' fluoro-modified nucleoside
  modified_base (9)..(9): 2' fluoro-modified nucleoside
  modified_base (10)..(10): 2' O-methyl modified nucleoside
  modified_base (11)..(11): 2' fluoro-modified nucleoside
  modified_base (12)..(12): 2' O-methyl modified nucleoside
  modified_base (13)..(13): 2' fluoro-modified nucleoside
  modified_base (14)..(14): 2' O-methyl modified nucleoside
  modified_base (15)..(15): 2' fluoro-modified nucleoside
  modified_base (16)..(16): 2' O-methyl modified nucleoside
  modified_base (17)..(17): 2' fluoro-modified nucleoside
  modified_base (18)..(18): 2' O-methyl modified nucleoside
  modified_base (19)..(19): 2' fluoro-modified nucleoside
  misc_feature (19)..(20): Phosphorothioate linkage
  modified_base (20)..(20): 2' O-methyl modified nucleoside
  misc_feature (20)..(21): Phosphorothioate linkage
  modified_base (21)..(21): 2' O-methyl modified nucleoside
ccaagaucccugacauagauu

SEQ ID NO: 11193 - RNA, 21 nt, Artificial Sequence
  Description of Artificial Sequence: Synthetic oligonucleotide
  modified_base (1)..(1): 2' fluoro-modified nucleoside
  misc_feature (1)..(2): Phosphorothioate linkage
  modified_base (2)..(2): 2' O-methyl modified nucleoside
  misc_feature (2)..(3): Phosphorothioate linkage
  modified_base (3)..(3): 2' fluoro-modified nucleoside
  modified_base (4)..(4): 2' O-methyl modified nucleoside
  modified_base (5)..(5): 2' fluoro-modified nucleoside
  modified_base (6)..(6): 2' O-methyl modified nucleoside
  modified_base (7)..(7): 2' fluoro-modified nucleoside
  modified_base (8)..(8): 2' fluoro-modified nucleoside
  modified_base (9)..(9): 2' fluoro-modified nucleoside
  modified_base (10)..(10): 2' O-methyl modified nucleoside
  modified_base (11)..(11): 2' fluoro-modified nucleoside
  modified_base (12)..(12): 2' O-methyl modified nucleoside
  modified_base (13)..(13): 2' fluoro-modified nucleoside
  modified_base (14)..(14): 2' O-methyl modified nucleoside
  modified_base (15)..(15): 2' fluoro-modified nucleoside
  modified_base (16)..(16): 2' O-methyl modified nucleoside
  modified_base (17)..(17): 2' fluoro-modified nucleoside
  modified_base (18)..(18): 2' O-methyl modified nucleoside
  modified_base (19)..(19): 2' fluoro-modified nucleoside
  misc_feature (19)..(20): Phosphorothioate linkage
  modified_base (20)..(20): 2' O-methyl modified nucleoside
  misc_feature (20)..(21): Phosphorothioate linkage
  modified_base (21)..(21): 2' O-methyl modified nucleoside
aagaucccugacauagcaauu

SEQ ID NO: 11194 - RNA, 21 nt, Artificial Sequence
  Description of Artificial Sequence: Synthetic oligonucleotide
  modified_base (1)..(1): 2' fluoro-modified nucleoside
  misc_feature (1)..(2): Phosphorothioate linkage
  modified_base (2)..(2): 2' O-methyl modified nucleoside
  misc_feature (2)..(3): Phosphorothioate linkage
  modified_base (3)..(3): 2' fluoro-modified nucleoside
  modified_base (4)..(4): 2' O-methyl modified nucleoside
  modified_base (5)..(5): 2' fluoro-modified nucleoside
  modified_base (6)..(6): 2' O-methyl modified nucleoside
  modified_base (7)..(7): 2' fluoro-modified nucleoside
  modified_base (8)..(8): 2' fluoro-modified nucleoside
  modified_base (9)..(9): 2' fluoro-modified nucleoside
  modified_base (10)..(10): 2' O-methyl modified nucleoside
  modified_base (11)..(11): 2' fluoro-modified nucleoside
  modified_base (12)..(12): 2' O-methyl modified nucleoside
  modified_base (13)..(13): 2' fluoro-modified nucleoside
  modified_base (14)..(14): 2' O-methyl modified nucleoside
  modified_base (15)..(15): 2' fluoro-modified nucleoside
  modified_base (16)..(16): 2' O-methyl modified nucleoside
  modified_base (17)..(17): 2' fluoro-modified nucleoside
  modified_base (18)..(18): 2' O-methyl modified nucleoside
  modified_base (19)..(19): 2' fluoro-modified nucleoside
  misc_feature (19)..(20): Phosphorothioate linkage
  modified_base (20)..(20): 2' O-methyl modified nucleoside
  misc_feature (20)..(21): Phosphorothioate linkage
  modified_base (21)..(21): 2' O-methyl modified nucleoside
agaucccugacauagcagauu

SEQ ID NO: 11195 - RNA, 21 nt, Artificial Sequence
  Description of Artificial Sequence: Synthetic oligonucleotide
  modified_base (1)..(1): 2' fluoro-modified nucleoside
  misc_feature (1)..(2): Phosphorothioate linkage
  modified_base (2)..(2): 2' O-methyl modified nucleoside
  misc_feature (2)..(3): Phosphorothioate linkage
  modified_base (3)..(3): 2' fluoro-modified nucleoside
  modified_base (4)..(4): 2' O-methyl modified nucleoside
  modified_base (5)..(5): 2' fluoro-modified nucleoside
  modified_base (6)..(6): 2' O-methyl modified nucleoside
  modified_base (7)..(7): 2' fluoro-modified nucleoside
  modified_base (8)..(8): 2' fluoro-modified nucleoside
  modified_base (9)..(9): 2' fluoro-modified nucleoside
  modified_base (10)..(10): 2' O-methyl modified nucleoside
  modified_base (11)..(11): 2' fluoro-modified nucleoside
  modified_base (12)..(12): 2' O-methyl modified nucleoside
  modified_base (13)..(13): 2' fluoro-modified nucleoside
  modified_base (14)..(14): 2' O-methyl modified nucleoside
  modified_base (15)..(15): 2' fluoro-modified nucleoside
  modified_base (16)..(16): 2' O-methyl modified nucleoside
  modified_base (17)..(17): 2' fluoro-modified nucleoside
  modified_base (18)..(18): 2' O-methyl modified nucleoside
  modified_base (19)..(19): 2' fluoro-modified nucleoside
  misc_feature (19)..(20): Phosphorothioate linkage
  modified_base (20)..(20): 2' O-methyl modified nucleoside
  misc_feature (20)..(21): Phosphorothioate linkage
  modified_base (21)..(21): 2' O-methyl modified nucleoside
aucccugacauagcaguaauu

SEQ ID NO: 11196 - RNA, 21 nt, Artificial Sequence
  Description of Artificial Sequence: Synthetic oligonucleotide
  modified_base (1)..(1): 2' fluoro-modified nucleoside
  misc_feature (1)..(2): Phosphorothioate linkage
  modified_base (2)..(2): 2' O-methyl modified nucleoside
  misc_feature (2)..(3): Phosphorothioate linkage
  modified_base (3)..(3): 2' fluoro-modified nucleoside
  modified_base (4)..(4): 2' O-methyl modified nucleoside
  modified_base (5)..(5): 2' fluoro-modified nucleoside
  modified_base (6)..(6): 2' O-methyl modified nucleoside
  modified_base (7)..(7): 2' fluoro-modified nucleoside
  modified_base (8)..(8): 2' fluoro-modified nucleoside
  modified_base (9)..(9): 2' fluoro-modified nucleoside
  modified_base (10)..(10): 2' O-methyl modified nucleoside
  modified_base (11)..(11): 2' fluoro-modified nucleoside
  modified_base (12)..(12): 2' O-methyl modified nucleoside
  modified_base (13)..(13): 2' fluoro-modified nucleoside
  modified_base (14)..(14): 2' O-methyl modified nucleoside
  modified_base (15)..(15): 2' fluoro-modified nucleoside
  modified_base (16)..(16): 2' O-methyl modified nucleoside
  modified_base (17)..(17): 2' fluoro-modified nucleoside
  modified_base (18)..(18): 2' O-methyl modified nucleoside
  modified_base (19)..(19): 2' fluoro-modified nucleoside
  misc_feature (19)..(20): Phosphorothioate linkage
  modified_base (20)..(20): 2' O-methyl modified nucleoside
  misc_feature (20)..(21): Phosphorothioate linkage
  modified_base (21)..(21): 2' O-methyl modified nucleoside
cccugacauagcaguagcauu

SEQ ID NO: 11197 - RNA, 21 nt, Artificial Sequence
  Description of Artificial Sequence: Synthetic oligonucleotide
  modified_base (1)..(1): 2' fluoro-modified nucleoside
  misc_feature (1)..(2): Phosphorothioate linkage
  modified_base (2)..(2): 2' O-methyl modified nucleoside
  misc_feature (2)..(3): Phosphorothioate linkage
  modified_base (3)..(3): 2' fluoro-modified nucleoside
  modified_base (4)..(4): 2' O-methyl modified nucleoside
  modified_base (5)..(5): 2' fluoro-modified nucleoside
  modified_base (6)..(6): 2' O-methyl modified nucleoside
  modified_base (7)..(7): 2' fluoro-modified nucleoside
  modified_base (8)..(8): 2' fluoro-modified nucleoside
  modified_base (9)..(9): 2' fluoro-modified nucleoside
  modified_base (10)..(10): 2' O-methyl modified nucleoside
  modified_base (11)..(11): 2' fluoro-modified nucleoside
  modified_base (12)..(12): 2' O-methyl modified nucleoside
  modified_base (13)..(13): 2' fluoro-modified nucleoside
  modified_base (14)..(14): 2' O-methyl modified nucleoside
  modified_base (15)..(15): 2' fluoro-modified nucleoside
  modified_base (16)..(16): 2' O-methyl modified nucleoside
  modified_base (17)..(17): 2' fluoro-modified nucleoside
  modified_base (18)..(18): 2' O-methyl modified nucleoside
  modified_base (19)..(19): 2' fluoro-modified nucleoside
  misc_feature (19)..(20): Phosphorothioate linkage
  modified_base (20)..(20): 2' O-methyl modified nucleoside
  misc_feature (20)..(21): Phosphorothioate linkage
  modified_base (21)..(21): 2' O-methyl modified nucleoside
ccugacauagcaguagcuauu

SEQ ID NO: 11198 - RNA, 21 nt, Artificial Sequence
  Description of Artificial Sequence: Synthetic oligonucleotide
  modified_base (1)..(1): 2' fluoro-modified nucleoside
  misc_feature (1)..(2): Phosphorothioate linkage
  modified_base (2)..(2): 2' O-methyl modified nucleoside
  misc_feature (2)..(3): Phosphorothioate linkage
  modified_base (3)..(3): 2' fluoro-modified nucleoside
  modified_base (4)..(4): 2' O-methyl modified nucleoside
  modified_base (5)..(5): 2' fluoro-modified nucleoside
  modified_base (6)..(6): 2' O-methyl modified nucleoside
  modified_base (7)..(7): 2' fluoro-modified nucleoside
  modified_base (8)..(8): 2' fluoro-modified nucleoside
  modified_base (9)..(9): 2' fluoro-modified nucleoside
  modified_base (10)..(10): 2' O-methyl modified nucleoside
  modified_base (11)..(11): 2' fluoro-modified nucleoside
  modified_base (12)..(12): 2' O-methyl modified nucleoside
  modified_base (13)..(13): 2' fluoro-modified nucleoside
  modified_base (14)..(14): 2' O-methyl modified nucleoside
  modified_base (15)..(15): 2' fluoro-modified nucleoside
  modified_base (16)..(16): 2' O-methyl modified nucleoside
  modified_base (17)..(17): 2' fluoro-modified nucleoside
  modified_base (18)..(18): 2' O-methyl modified nucleoside
  modified_base (19)..(19): 2' fluoro-modified nucleoside
  misc_feature (19)..(20): Phosphorothioate linkage
  modified_base (20)..(20): 2' O-methyl modified nucleoside
  misc_feature (20)..(21): Phosphorothioate linkage
  modified_base (21)..(21): 2' O-methyl modified nucleoside
acauagcaguagcuugucauu

SEQ ID NO: 11199 - RNA, 21 nt, Artificial Sequence
  Description of Artificial Sequence: Synthetic oligonucleotide
  modified_base (1)..(1): 2' fluoro-modified nucleoside
  misc_feature (1)..(2): Phosphorothioate linkage
  modified_base (2)..(2): 2' O-methyl modified nucleoside
  misc_feature (2)..(3): Phosphorothioate linkage
  modified_base (3)..(3): 2' fluoro-modified nucleoside
  modified_base (4)..(4): 2' O-methyl modified nucleoside
  modified_base (5)..(5): 2' fluoro-modified nucleoside
  modified_base (6)..(6): 2' O-methyl modified nucleoside
  modified_base (7)..(7): 2' fluoro-modified nucleoside
  modified_base (8)..(8): 2' fluoro-modified nucleoside
  modified_base (9)..(9): 2' fluoro-modified nucleoside
  modified_base (10)..(10): 2' O-methyl modified nucleoside
  modified_base (11)..(11): 2' fluoro-modified nucleoside
  modified_base (12)..(12): 2' O-methyl modified nucleoside
  modified_base (13)..(13): 2' fluoro-modified nucleoside
  modified_base (14)..(14): 2' O-methyl modified nucleoside
  modified_base (15)..(15): 2' fluoro-modified nucleoside
  modified_base (16)..(16): 2' O-methyl modified nucleoside
  modified_base (17)..(17): 2' fluoro-modified nucleoside
  modified_base (18)..(18): 2' O-methyl modified nucleoside
  modified_base (19)..(19): 2' fluoro-modified nucleoside
  misc_feature (19)..(20): Phosphorothioate linkage
  modified_base (20)..(20): 2' O-methyl modified nucleoside
  misc_feature (20)..(21): Phosphorothioate linkage
  modified_base (21)..(21): 2' O-methyl modified nucleoside
cauagcaguagcuugucuauu

SEQ ID NO: 11200 - RNA, 21 nt, Artificial Sequence
  Description of Artificial Sequence: Synthetic oligonucleotide
  modified_base (1)..(1): 2' fluoro-modified nucleoside
  misc_feature (1)..(2): Phosphorothioate linkage
  modified_base (2)..(2): 2' O-methyl modified nucleoside
  misc_feature (2)..(3): Phosphorothioate linkage
  modified_base (3)..(3): 2' fluoro-modified nucleoside
  modified_base (4)..(4): 2' O-methyl modified nucleoside
  modified_base (5)..(5): 2' fluoro-modified nucleoside
  modified_base (6)..(6): 2' O-methyl modified nucleoside
  modified_base (7)..(7): 2' fluoro-modified nucleoside
  modified_base (8)..(8): 2' fluoro-modified nucleoside
  modified_base (9)..(9): 2' fluoro-modified nucleoside
  modified_base (10)..(10): 2' O-methyl modified nucleoside
  modified_base (11)..(11): 2' fluoro-modified nucleoside
  modified_base (12)..(12): 2' O-methyl modified nucleoside
  modified_base (13)..(13): 2' fluoro-modified nucleoside
  modified_base (14)..(14): 2' O-methyl modified nucleoside
  modified_base (15)..(15): 2' fluoro-modified nucleoside
  modified_base (16)..(16): 2' O-methyl modified nucleoside
  modified_base (17)..(17): 2' fluoro-modified nucleoside
  modified_base (18)..(18): 2' O-methyl modified nucleoside
  modified_base (19)..(19): 2' fluoro-modified nucleoside
  misc_feature (19)..(20): Phosphorothioate linkage
  modified_base (20)..(20): 2' O-methyl modified nucleoside
  misc_feature (20)..(21): Phosphorothioate linkage
  modified_base (21)..(21): 2' O-methyl modified nucleoside
agcaguagcuugucuuuuauu

SEQ ID NO: 11201 - RNA, 21 nt, Artificial Sequence
  Description of Artificial Sequence: Synthetic oligonucleotide
  modified_base (1)..(1): 2' fluoro-modified nucleoside
  misc_feature (1)..(2): Phosphorothioate linkage
  modified_base (2)..(2): 2' O-methyl modified nucleoside
  misc_feature (2)..(3): Phosphorothioate linkage
  modified_base (3)..(3): 2' fluoro-modified nucleoside
  modified_base (4)..(4): 2' O-methyl modified nucleoside
  modified_base (5)..(5): 2' fluoro-modified nucleoside
  modified_base (6)..(6): 2' O-methyl modified nucleoside
  modified_base (7)..(7): 2' fluoro-modified nucleoside
  modified_base (8)..(8): 2' fluoro-modified nucleoside
  modified_base (9)..(9): 2' fluoro-modified nucleoside
  modified_base (10)..(10): 2' O-methyl modified nucleoside
  modified_base (11)..(11): 2' fluoro-modified nucleoside
  modified_base (12)..(12): 2' O-methyl modified nucleoside
  modified_base (13)..(13): 2' fluoro-modified nucleoside
  modified_base (14)..(14): 2' O-methyl modified nucleoside
  modified_base (15)..(15): 2' fluoro-modified nucleoside
  modified_base (16)..(16): 2' O-methyl modified nucleoside
  modified_base (17)..(17): 2' fluoro-modified nucleoside
  modified_base (18)..(18): 2' O-methyl modified nucleoside
  modified_base (19)..(19): 2' fluoro-modified nucleoside
  misc_feature (19)..(20): Phosphorothioate linkage
  modified_base (20)..(20): 2' O-methyl modified nucleoside
  misc_feature (20)..(21): Phosphorothioate linkage
  modified_base (21)..(21): 2' O-methyl modified nucleoside
aaacacaaaucccuuugcauu

SEQ ID NO: 11202 - RNA, 21 nt, Artificial Sequence
  Description of Artificial Sequence: Synthetic oligonucleotide
  modified_base (1)..(1): 2' fluoro-modified nucleoside
  misc_feature (1)..(2): Phosphorothioate linkage
  modified_base (2)..(2): 2' O-methyl modified nucleoside
  misc_feature (2)..(3): Phosphorothioate linkage
  modified_base (3)..(3): 2' fluoro-modified nucleoside
  modified_base (4)..(4): 2' O-methyl modified nucleoside
  modified_base (5)..(5): 2' fluoro-modified nucleoside
  modified_base (6)..(6): 2' O-methyl modified nucleoside
  modified_base (7)..(7): 2' fluoro-modified nucleoside
  modified_base (8)..(8): 2' fluoro-modified nucleoside
  modified_base (9)..(9): 2' fluoro-modified nucleoside
  modified_base (10)..(10): 2' O-methyl modified nucleoside
  modified_base (11)..(11): 2' fluoro-modified nucleoside
  modified_base (12)..(12): 2' O-methyl modified nucleoside
  modified_base (13)..(13): 2' fluoro-modified nucleoside
  modified_base (14)..(14): 2' O-methyl modified nucleoside
  modified_base (15)..(15): 2' fluoro-modified nucleoside
  modified_base (16)..(16): 2' O-methyl modified nucleoside
  modified_base (17)..(17): 2' fluoro-modified nucleoside
  modified_base (18)..(18): 2' O-methyl modified nucleoside
  modified_base (19)..(19): 2' fluoro-modified nucleoside
  misc_feature (19)..(20): Phosphorothioate linkage
  modified_base (20)..(20): 2' O-methyl modified nucleoside
  misc_feature (20)..(21): Phosphorothioate linkage
  modified_base (21)..(21): 2' O-methyl modified nucleoside
uaggccuuugaguguuagauu

SEQ ID NO: 11203 - RNA, 21 nt, Artificial Sequence
  Description of Artificial Sequence: Synthetic oligonucleotide
  modified_base (1)..(1): 2' fluoro-modified nucleoside
  misc_feature (1)..(2): Phosphorothioate linkage
  modified_base (2)..(2): 2' O-methyl modified nucleoside
  misc_feature (2)..(3): Phosphorothioate linkage
  modified_base (3)..(3): 2' fluoro-modified nucleoside
  modified_base (4)..(4): 2' O-methyl modified nucleoside
  modified_base (5)..(5): 2' fluoro-modified nucleoside
  modified_base (6)..(6): 2' O-methyl modified nucleoside
  modified_base (7)..(7): 2' fluoro-modified nucleoside
  modified_base (8)..(8): 2' fluoro-modified nucleoside
  modified_base (9)..(9): 2' fluoro-modified nucleoside
  modified_base (10)..(10): 2' O-methyl modified nucleoside
  modified_base (11)..(11): 2' fluoro-modified nucleoside
  modified_base (12)..(12): 2' O-methyl modified nucleoside
  modified_base (13)..(13): 2' fluoro-modified nucleoside
  modified_base (14)..(14): 2' O-methyl modified nucleoside
  modified_base (15)..(15): 2' fluoro-modified nucleoside
  modified_base (16)..(16): 2' O-methyl modified nucleoside
  modified_base (17)..(17): 2' fluoro-modified nucleoside
  modified_base (18)..(18): 2' O-methyl modified nucleoside
  modified_base (19)..(19): 2' fluoro-modified nucleoside
  misc_feature (19)..(20): Phosphorothioate linkage
  modified_base (20)..(20): 2' O-methyl modified nucleoside
  misc_feature (20)..(21): Phosphorothioate linkage
  modified_base (21)..(21): 2' O-methyl modified nucleoside
aggccuuugaguguuagaauu

SEQ ID NO: 11204 - RNA, 21 nt, Artificial Sequence
  Description of Artificial Sequence: Synthetic oligonucleotide
  modified_base (1)..(1): 2' fluoro-modified nucleoside
  misc_feature (1)..(2): Phosphorothioate linkage
  modified_base (2)..(2): 2' O-methyl modified nucleoside
  misc_feature (2)..(3): Phosphorothioate linkage
  modified_base (3)..(3): 2' fluoro-modified nucleoside
  modified_base (4)..(4): 2' O-methyl modified nucleoside
  modified_base (5)..(5): 2' fluoro-modified nucleoside
  modified_base (6)..(6): 2' O-methyl modified nucleoside
  modified_base (7)..(7): 2' fluoro-modified nucleoside
  modified_base (8)..(8): 2' fluoro-modified nucleoside
  modified_base (9)..(9): 2' fluoro-modified nucleoside
  modified_base (10)..(10): 2' O-methyl modified nucleoside
  modified_base (11)..(11): 2' fluoro-modified nucleoside
  modified_base (12)..(12): 2' O-methyl modified nucleoside
  modified_base (13)..(13): 2' fluoro-modified nucleoside
  modified_base (14)..(14): 2' O-methyl modified nucleoside
  modified_base (15)..(15): 2' fluoro-modified nucleoside
  modified_base (16)..(16): 2' O-methyl modified nucleoside
  modified_base (17)..(17): 2' fluoro-modified nucleoside
  modified_base (18)..(18): 2' O-methyl modified nucleoside
  modified_base (19)..(19): 2' fluoro-modified nucleoside
  misc_feature (19)..(20): Phosphorothioate linkage
  modified_base (20)..(20): 2' O-methyl modified nucleoside
  misc_feature (20)..(21): Phosphorothioate linkage
  modified_base (21)..(21): 2' O-methyl modified nucleoside
aaauuaucuugagucuacauu

SEQ ID NO: 11205 - RNA, 21 nt, Artificial Sequence
  Description of Artificial Sequence: Synthetic oligonucleotide
  modified_base (1)..(1): 2' fluoro-modified nucleoside
  misc_feature (1)..(2): Phosphorothioate linkage
  modified_base (2)..(2): 2' O-methyl modified nucleoside
  misc_feature (2)..(3): Phosphorothioate linkage
  modified_base (3)..(3): 2' fluoro-modified nucleoside
  modified_base (4)..(4): 2' O-methyl modified nucleoside
  modified_base (5)..(5): 2' fluoro-modified nucleoside
  modified_base (6)..(6): 2' O-methyl modified nucleoside
  modified_base (7)..(7): 2' fluoro-modified nucleoside
  modified_base (8)..(8): 2' fluoro-modified nucleoside
  modified_base (9)..(9): 2' fluoro-modified nucleoside
  modified_base (10)..(10): 2' O-methyl modified nucleoside
  modified_base (11)..(11): 2' fluoro-modified nucleoside
  modified_base (12)..(12): 2' O-methyl modified nucleoside
  modified_base (13)..(13): 2' fluoro-modified nucleoside
  modified_base (14)..(14): 2' O-methyl modified nucleoside
  modified_base (15)..(15): 2' fluoro-modified nucleoside
  modified_base (16)..(16): 2' O-methyl modified nucleoside
  modified_base (17)..(17): 2' fluoro-modified nucleoside
  modified_base (18)..(18): 2' O-methyl modified nucleoside
  modified_base (19)..(19): 2' fluoro-modified nucleoside
  misc_feature (19)..(20): Phosphorothioate linkage
  modified_base (20)..(20): 2' O-methyl modified nucleoside
  misc_feature (20)..(21): Phosphorothioate linkage
  modified_base (21)..(21): 2' O-methyl modified nucleoside
aauuaucuugagucuacaauu

SEQ ID NO: 11206 - RNA, 21 nt, Artificial Sequence
  Description of Artificial Sequence: Synthetic oligonucleotide
  modified_base (1)..(1): 2' fluoro-modified nucleoside
  misc_feature (1)..(2): Phosphorothioate linkage
  modified_base (2)..(2): 2' O-methyl modified nucleoside
  misc_feature (2)..(3): Phosphorothioate linkage
  modified_base (3)..(3): 2' fluoro-modified nucleoside
  modified_base (4)..(4): 2' O-methyl modified nucleoside
  modified_base (5)..(5): 2' fluoro-modified nucleoside
  modified_base (6)..(6): 2' O-methyl modified nucleoside
  modified_base (7)..(7): 2' fluoro-modified nucleoside
  modified_base (8)..(8): 2' fluoro-modified nucleoside
  modified_base (9)..(9): 2' fluoro-modified nucleoside
  modified_base (10)..(10): 2' O-methyl modified nucleoside
  modified_base (11)..(11): 2' fluoro-modified nucleoside
  modified_base (12)..(12): 2' O-methyl modified nucleoside
  modified_base (13)..(13): 2' fluoro-modified nucleoside
  modified_base (14)..(14): 2' O-methyl modified nucleoside
  modified_base (15)..(15): 2' fluoro-modified nucleoside
  modified_base (16)..(16): 2' O-methyl modified nucleoside
  modified_base (17)..(17): 2' fluoro-modified nucleoside
  modified_base (18)..(18): 2' O-methyl modified nucleoside
  modified_base (19)..(19): 2' fluoro-modified nucleoside
  misc_feature (19)..(20): Phosphorothioate linkage
  modified_base (20)..(20): 2' O-methyl modified nucleoside
  misc_feature (20)..(21): Phosphorothioate linkage
  modified_base (21)..(21): 2' O-methyl modified nucleoside
aaacacaaaaauuguucgauu

SEQ ID NO: 11207 - RNA, 21 nt, Artificial Sequence
  Description of Artificial Sequence: Synthetic oligonucleotide
  modified_base (1)..(1): 2' fluoro-modified nucleoside
  misc_feature (1)..(2): Phosphorothioate linkage
  modified_base (2)..(2): 2' O-methyl modified nucleoside
  misc_feature (2)..(3): Phosphorothioate linkage
  modified_base (3)..(3): 2' fluoro-modified nucleoside
  modified_base (4)..(4): 2' O-methyl modified nucleoside
  modified_base (5)..(5): 2' fluoro-modified nucleoside
  modified_base (6)..(6): 2' O-methyl modified nucleoside
  modified_base (7)..(7): 2' fluoro-modified nucleoside
  modified_base (8)..(8): 2' fluoro-modified nucleoside
  modified_base (9)..(9): 2' fluoro-modified nucleoside
  modified_base (10)..(10): 2' O-methyl modified nucleoside
  modified_base (11)..(11): 2' fluoro-modified nucleoside
  modified_base (12)..(12): 2' O-methyl modified nucleoside
  modified_base (13)..(13): 2' fluoro-modified nucleoside
  modified_base (14)..(14): 2' O-methyl modified nucleoside
  modified_base (15)..(15): 2' fluoro-modified nucleoside
  modified_base (16)..(16): 2' O-methyl modified nucleoside
  modified_base (17)..(17): 2' fluoro-modified nucleoside
  modified_base (18)..(18): 2' O-methyl modified nucleoside
  modified_base (19)..(19): 2' fluoro-modified nucleoside
  misc_feature (19)..(20): Phosphorothioate linkage
  modified_base (20)..(20): 2' O-methyl modified nucleoside
  misc_feature (20)..(21): Phosphorothioate linkage
  modified_base (21)..(21): 2' O-methyl modified nucleoside
acacaaaaauuguucggcauu

SEQ ID NO: 11208 - RNA, 21 nt, Artificial Sequence
  Description of Artificial Sequence: Synthetic oligonucleotide
  modified_base (1)..(1): 2' fluoro-modified nucleoside
  misc_feature (1)..(2): Phosphorothioate linkage
  modified_base (2)..(2): 2' O-methyl modified nucleoside
  misc_feature (2)..(3): Phosphorothioate linkage
  modified_base (3)..(3): 2' fluoro-modified nucleoside
  modified_base (4)..(4): 2' O-methyl modified nucleoside
  modified_base (5)..(5): 2' fluoro-modified nucleoside
  modified_base (6)..(6): 2' O-methyl modified nucleoside
  modified_base (7)..(7): 2' fluoro-modified nucleoside
  modified_base (8)..(8): 2' fluoro-modified nucleoside
  modified_base (9)..(9): 2' fluoro-modified nucleoside
  modified_base (10)..(10): 2' O-methyl modified nucleoside
  modified_base (11)..(11): 2' fluoro-modified nucleoside
  modified_base (12)..(12): 2' O-methyl modified nucleoside
  modified_base (13)..(13): 2' fluoro-modified nucleoside
  modified_base (14)..(14): 2' O-methyl modified nucleoside
  modified_base (15)..(15): 2' fluoro-modified nucleoside
  modified_base (16)..(16): 2' O-methyl modified nucleoside
  modified_base (17)..(17): 2' fluoro-modified nucleoside
  modified_base (18)..(18): 2' O-methyl modified nucleoside
  modified_base (19)..(19): 2' fluoro-modified nucleoside
  misc_feature (19)..(20): Phosphorothioate linkage
  modified_base (20)..(20): 2' O-methyl modified nucleoside
  misc_feature (20)..(21): Phosphorothioate linkage
  modified_base (21)..(21): 2' O-methyl modified nucleoside
cacaaaaauuguucggcuauu

SEQ ID NO: 11209 - RNA, 21 nt, Artificial Sequence
  Description of Artificial Sequence: Synthetic oligonucleotide
  modified_base (1)..(1): 2' fluoro-modified nucleoside
  misc_feature (1)..(2): Phosphorothioate linkage
  modified_base (2)..(2): 2' O-methyl modified nucleoside
  misc_feature (2)..(3): Phosphorothioate linkage
  modified_base (3)..(3): 2' fluoro-modified nucleoside
  modified_base (4)..(4): 2' O-methyl modified nucleoside
  modified_base (5)..(5): 2' fluoro-modified nucleoside
  modified_base (6)..(6): 2' O-methyl modified nucleoside
  modified_base (7)..(7): 2' fluoro-modified nucleoside
  modified_base (8)..(8): 2' fluoro-modified nucleoside
  modified_base (9)..(9): 2' fluoro-modified nucleoside
  modified_base (10)..(10): 2' O-methyl modified nucleoside
  modified_base (11)..(11): 2' fluoro-modified nucleoside
  modified_base (12)..(12): 2' O-methyl modified nucleoside
  modified_base (13)..(13): 2' fluoro-modified nucleoside
  modified_base (14)..(14): 2' O-methyl modified nucleoside
  modified_base (15)..(15): 2' fluoro-modified nucleoside
  modified_base (16)..(16): 2' O-methyl modified nucleoside
  modified_base (17)..(17): 2' fluoro-modified nucleoside
  modified_base (18)..(18): 2' O-methyl modified nucleoside
  modified_base (19)..(19): 2' fluoro-modified nucleoside
  misc_feature (19)..(20): Phosphorothioate linkage
  modified_base (20)..(20): 2' O-methyl modified nucleoside
  misc_feature (20)..(21): Phosphorothioate linkage
  modified_base (21)..(21): 2' O-methyl modified nucleoside
acaaaaauuguucggcugauu

SEQ ID NO: 11210 - RNA, 21 nt, Artificial Sequence
  Description of Artificial Sequence: Synthetic oligonucleotide
  modified_base (1)..(1): 2' fluoro-modified nucleoside
  misc_feature (1)..(2): Phosphorothioate linkage
  modified_base (2)..(2): 2' O-methyl modified nucleoside
  misc_feature (2)..(3): Phosphorothioate linkage
  modified_base (3)..(3): 2' fluoro-modified nucleoside
  modified_base (4)..(4): 2' O-methyl modified nucleoside
  modified_base (5)..(5): 2' fluoro-modified nucleoside
  modified_base (6)..(6): 2' O-methyl modified nucleoside
  modified_base (7)..(7): 2' fluoro-modified nucleoside
  modified_base (8)..(8): 2' fluoro-modified nucleoside
  modified_base (9)..(9): 2' fluoro-modified nucleoside
  modified_base (10)..(10): 2' O-methyl modified nucleoside
  modified_base (11)..(11): 2' fluoro-modified nucleoside
  modified_base (12)..(12): 2' O-methyl modified nucleoside
  modified_base (13)..(13): 2' fluoro-modified nucleoside
  modified_base (14)..(14): 2' O-methyl modified nucleoside
  modified_base (15)..(15): 2' fluoro-modified nucleoside
  modified_base (16)..(16): 2' O-methyl modified nucleoside
  modified_base (17)..(17): 2' fluoro-modified nucleoside
  modified_base (18)..(18): 2' O-methyl modified nucleoside
  modified_base (19)..(19): 2' fluoro-modified nucleoside
  misc_feature (19)..(20): Phosphorothioate linkage
  modified_base (20)..(20): 2' O-methyl modified nucleoside
  misc_feature (20)..(21): Phosphorothioate linkage
  modified_base (21)..(21): 2' O-methyl modified nucleoside
cggcacaaaacugccuuaauu

SEQ ID NO: 11211 - RNA, 21 nt, Artificial Sequence
  Description of Artificial Sequence: Synthetic oligonucleotide
  modified_base (1)..(1): 2' fluoro-modified nucleoside
  misc_feature (1)..(2): Phosphorothioate linkage
  modified_base (2)..(2): 2' O-methyl modified nucleoside
  misc_feature (2)..(3): Phosphorothioate linkage
  modified_base (3)..(3): 2' fluoro-modified nucleoside
  modified_base (4)..(4): 2' O-methyl modified nucleoside
  modified_base (5)..(5): 2' fluoro-modified nucleoside
  modified_base (6)..(6): 2' O-methyl modified nucleoside
  modified_base (7)..(7): 2' fluoro-modified nucleoside
  modified_base (8)..(8): 2' fluoro-modified nucleoside
  modified_base (9)..(9): 2' fluoro-modified nucleoside
  modified_base (10)..(10): 2' O-methyl modified nucleoside
  modified_base (11)..(11): 2' fluoro-modified nucleoside
  modified_base (12)..(12): 2' O-methyl modified nucleoside
  modified_base (13)..(13): 2' fluoro-modified nucleoside
  modified_base (14)..(14): 2' O-methyl modified nucleoside
  modified_base (15)..(15): 2' fluoro-modified nucleoside
  modified_base (16)..(16): 2' O-methyl modified nucleoside
  modified_base (17)..(17): 2' fluoro-modified nucleoside
  modified_base (18)..(18): 2' O-methyl modified nucleoside
  modified_base (19)..(19): 2' fluoro-modified nucleoside
  misc_feature (19)..(20): Phosphorothioate linkage
  modified_base (20)..(20): 2' O-methyl modified nucleoside
  misc_feature (20)..(21): Phosphorothioate linkage
  modified_base (21)..(21): 2' O-methyl modified nucleoside
gaagguagaugguguuauauu

SEQ ID NO: 11212 - RNA, 21 nt, Artificial Sequence
  Description of Artificial Sequence: Synthetic oligonucleotide
  modified_base (1)..(1): 2' fluoro-modified nucleoside
  misc_feature (1)..(2): Phosphorothioate linkage
  modified_base (2)..(2): 2' O-methyl modified nucleoside
  misc_feature (2)..(3): Phosphorothioate linkage
  modified_base (3)..(3): 2' fluoro-modified nucleoside
  modified_base (4)..(4): 2' O-methyl modified nucleoside
  modified_base (5)..(5): 2' fluoro-modified nucleoside
  modified_base (6)..(6): 2' O-methyl modified nucleoside
  modified_base (7)..(7): 2' fluoro-modified nucleoside
  modified_base (8)..(8): 2' fluoro-modified nucleoside
  modified_base (9)..(9): 2' fluoro-modified nucleoside
  modified_base (10)..(10): 2' O-methyl modified nucleoside
  modified_base (11)..(11): 2' fluoro-modified nucleoside
  modified_base (12)..(12): 2' O-methyl modified nucleoside
  modified_base (13)..(13): 2' fluoro-modified nucleoside
  modified_base (14)..(14): 2' O-methyl modified nucleoside
  modified_base (15)..(15): 2' fluoro-modified nucleoside
  modified_base (16)..(16): 2' O-methyl modified nucleoside
  modified_base (17)..(17): 2' fluoro-modified nucleoside
  modified_base (18)..(18): 2' O-methyl modified nucleoside
  modified_base (19)..(19): 2' fluoro-modified nucleoside
  misc_feature (19)..(20): Phosphorothioate linkage
  modified_base (20)..(20): 2' O-methyl modified nucleoside
  misc_feature (20)..(21): Phosphorothioate linkage
  modified_base (21)..(21): 2' O-methyl modified nucleoside
guagaugguguuauaguuauu

SEQ ID NO: 11213 - RNA, 21 nt, Artificial Sequence
  Description of Artificial Sequence: Synthetic oligonucleotide
  modified_base (1)..(1): 2' O-methyl modified nucleoside
  misc_feature (1)..(2): Phosphorothioate linkage
  modified_base (2)..(2): 2' fluoro-modified nucleoside
  misc_feature (2)..(3): Phosphorothioate linkage
  modified_base (3)..(3): 2' O-methyl modified nucleoside
  modified_base (4)..(4): 2' fluoro-modified nucleoside
  modified_base (5)..(5): 2' O-methyl modified nucleoside
  modified_base (6)..(6): 2' fluoro-modified nucleoside
  modified_base (7)..(7): 2' O-methyl modified nucleoside
  modified_base (8)..(8): 2' fluoro-modified nucleoside
  modified_base (9)..(9): 2' O-methyl modified nucleoside
  modified_base (10)..(10): 2' fluoro-modified nucleoside
  modified_base (11)..(11): 2' O-methyl modified nucleoside
  modified_base (12)..(12): 2' O-methyl modified nucleoside
  modified_base (13)..(13): 2' O-methyl modified nucleoside
  modified_base (14)..(14): 2' fluoro-modified nucleoside
  modified_base (15)..(15): 2' O-methyl modified nucleoside
  modified_base (16)..(16): 2' fluoro-modified nucleoside
  modified_base (17)..(17): 2' O-methyl modified nucleoside
  modified_base (18)..(18): 2' fluoro-modified nucleoside
  modified_base (19)..(19): 2' O-methyl modified nucleoside
  misc_feature (19)..(20): Phosphorothioate linkage
  modified_base (20)..(20): 2' O-methyl modified nucleoside
  misc_feature (20)..(21): Phosphorothioate linkage
  modified_base (21)..(21): 2' O-methyl modified nucleoside
ugccuauagcuuuccuuccuu

SEQ ID NO: 11214 - RNA, 21 nt, Artificial Sequence
  Description of Artificial Sequence: Synthetic oligonucleotide
  modified_base (1)..(1): 2' O-methyl modified nucleoside
  misc_feature (1)..(2): Phosphorothioate linkage
  modified_base (2)..(2): 2' fluoro-modified nucleoside
  misc_feature (2)..(3): Phosphorothioate linkage
  modified_base (3)..(3): 2' O-methyl modified nucleoside
  modified_base (4)..(4): 2' fluoro-modified nucleoside
  modified_base (5)..(5): 2' O-methyl modified nucleoside
  modified_base (6)..(6): 2' fluoro-modified nucleoside
  modified_base (7)..(7): 2' O-methyl modified nucleoside
  modified_base (8)..(8): 2' fluoro-modified nucleoside
  modified_base (9)..(9): 2' O-methyl modified nucleoside
  modified_base (10)..(10): 2' fluoro-modified nucleoside
  modified_base (11)..(11): 2' O-methyl modified nucleoside
  modified_base (12)..(12): 2' O-methyl modified nucleoside
  modified_base (13)..(13): 2' O-methyl modified nucleoside
  modified_base (14)..(14): 2' fluoro-modified nucleoside
  modified_base (15)..(15): 2' O-methyl modified nucleoside
  modified_base (16)..(16): 2' fluoro-modified nucleoside
  modified_base (17)..(17): 2' O-methyl modified nucleoside
  modified_base (18)..(18): 2' fluoro-modified nucleoside
  modified_base (19)..(19): 2' O-methyl modified nucleoside
  misc_feature (19)..(20): Phosphorothioate linkage
  modified_base (20)..(20): 2' O-methyl modified nucleoside
  misc_feature (20)..(21): Phosphorothioate linkage
  modified_base (21)..(21): 2' O-methyl modified nucleoside
ucuugagucucugacaggguu

SEQ ID NO: 11215 - RNA, 21 nt, Artificial Sequence
  Description of Artificial Sequence: Synthetic oligonucleotide
  modified_base (1)..(1): 2' O-methyl modified nucleoside
  misc_feature (1)..(2): Phosphorothioate linkage
  modified_base (2)..(2): 2' fluoro-modified nucleoside
  misc_feature (2)..(3): Phosphorothioate linkage
  modified_base (3)..(3): 2' O-methyl modified nucleoside
  modified_base (4)..(4): 2' fluoro-modified nucleoside
  modified_base (5)..(5): 2' O-methyl modified nucleoside
  modified_base (6)..(6): 2' fluoro-modified nucleoside
  modified_base (7)..(7): 2' O-methyl modified nucleoside
  modified_base (8)..(8): 2' fluoro-modified nucleoside
  modified_base (9)..(9): 2' O-methyl modified nucleoside
  modified_base (10)..(10): 2' fluoro-modified nucleoside
  modified_base (11)..(11): 2' O-methyl modified nucleoside
  modified_base (12)..(12): 2' O-methyl modified nucleoside
  modified_base (13)..(13): 2' O-methyl modified nucleoside
  modified_base (14)..(14): 2' fluoro-modified nucleoside
  modified_base (15)..(15): 2' O-methyl modified nucleoside
  modified_base (16)..(16): 2' fluoro-modified nucleoside
  modified_base (17)..(17): 2' O-methyl modified nucleoside
  modified_base (18)..(18): 2' fluoro-modified nucleoside
  modified_base (19)..(19): 2' O-methyl modified nucleoside
  misc_feature (19)..(20): Phosphorothioate linkage
  modified_base (20)..(20): 2' O-methyl modified nucleoside
  misc_feature (20)..(21): Phosphorothioate linkage
  modified_base (21)..(21): 2' O-methyl modified nucleoside
ucgccacuuuguuguuuucuu

SEQ ID NO: 11216 - RNA, 21 nt, Artificial Sequence
  Description of Artificial Sequence: Synthetic oligonucleotide
  modified_base (1)..(1): 2' O-methyl modified nucleoside
  misc_feature (1)..(2): Phosphorothioate linkage
  modified_base (2)..(2): 2' fluoro-modified nucleoside
  misc_feature (2)..(3): Phosphorothioate linkage
  modified_base (3)..(3): 2' O-methyl modified nucleoside
  modified_base (4)..(4): 2' fluoro-modified nucleoside
  modified_base (5)..(5): 2' O-methyl modified nucleoside
  modified_base (6)..(6): 2' fluoro-modified nucleoside
  modified_base (7)..(7): 2' O-methyl modified nucleoside
  modified_base (8)..(8): 2' fluoro-modified nucleoside
  modified_base (9)..(9): 2' O-methyl modified nucleoside
  modified_base (10)..(10): 2' fluoro-modified nucleoside
  modified_base (11)..(11): 2' O-methyl modified nucleoside
  modified_base (12)..(12): 2' O-methyl modified nucleoside
  modified_base (13)..(13): 2' O-methyl modified nucleoside
  modified_base (14)..(14): 2' fluoro-modified nucleoside
  modified_base (15)..(15): 2' O-methyl modified nucleoside
  modified_base (16)..(16): 2' fluoro-modified nucleoside
  modified_base (17)..(17): 2' O-methyl modified nucleoside
  modified_base (18)..(18): 2' fluoro-modified nucleoside
  modified_base (19)..(19): 2' O-methyl modified nucleoside
  misc_feature (19)..(20): Phosphorothioate linkage
  modified_base (20)..(20): 2' O-methyl modified nucleoside
  misc_feature (20)..(21): Phosphorothioate linkage
  modified_base (21)..(21): 2' O-methyl modified nucleoside
ucucgccacuuuguuguuuuu

SEQ ID NO: 11217 - RNA, 21 nt, Artificial Sequence
  Description of Artificial Sequence: Synthetic oligonucleotide
  modified_base (1)..(1): 2' O-methyl modified nucleoside
  misc_feature (1)..(2): Phosphorothioate linkage
  modified_base (2)..(2): 2' fluoro-modified nucleoside
  misc_feature (2)..(3): Phosphorothioate linkage
  modified_base (3)..(3): 2' O-methyl modified nucleoside
  modified_base (4)..(4): 2' fluoro-modified nucleoside
  modified_base (5)..(5): 2' O-methyl modified nucleoside
  modified_base (6)..(6): 2' fluoro-modified nucleoside
  modified_base (7)..(7): 2' O-methyl modified nucleoside
  modified_base (8)..(8): 2' fluoro-modified nucleoside
  modified_base (9)..(9): 2' O-methyl modified nucleoside
  modified_base (10)..(10): 2' fluoro-modified nucleoside
  modified_base (11)..(11): 2' O-methyl modified nucleoside
  modified_base (12)..(12): 2' O-methyl modified nucleoside
  modified_base (13)..(13): 2' O-methyl modified nucleoside
  modified_base (14)..(14): 2' fluoro-modified nucleoside
  modified_base (15)..(15): 2' O-methyl modified nucleoside
  modified_base (16)..(16): 2' fluoro-modified nucleoside
  modified_base (17)..(17): 2' O-methyl modified nucleoside
  modified_base (18)..(18): 2' fluoro-modified nucleoside
  modified_base (19)..(19): 2' O-methyl modified nucleoside
  misc_feature (19)..(20): Phosphorothioate linkage
  modified_base (20)..(20): 2' O-methyl modified nucleoside
  misc_feature (20)..(21): Phosphorothioate linkage
  modified_base (21)..(21): 2' O-methyl modified nucleoside
uacgcuuucacucugaggguu

SEQ ID NO: 11218 - RNA, 21 nt, Artificial Sequence
  Description of Artificial Sequence: Synthetic oligonucleotide
  modified_base (1)..(1): 2' O-methyl modified nucleoside
  misc_feature (1)..(2): Phosphorothioate linkage
  modified_base (2)..(2): 2' fluoro-modified nucleoside
  misc_feature (2)..(3): Phosphorothioate linkage
  modified_base (3)..(3): 2' O-methyl modified nucleoside
  modified_base (4)..(4): 2' fluoro-modified nucleoside
  modified_base (5)..(5): 2' O-methyl modified nucleoside
  modified_base (6)..(6): 2' fluoro-modified nucleoside
  modified_base (7)..(7): 2' O-methyl modified nucleoside
  modified_base (8)..(8): 2' fluoro-modified nucleoside
  modified_base (9)..(9): 2' O-methyl modified nucleoside
  modified_base (10)..(10): 2' fluoro-modified nucleoside
  modified_base (11)..(11): 2' O-methyl modified nucleoside
  modified_base (12)..(12): 2' O-methyl modified nucleoside
  modified_base (13)..(13): 2' O-methyl modified nucleoside
  modified_base (14)..(14): 2' fluoro-modified nucleoside
  modified_base (15)..(15): 2' O-methyl modified nucleoside
  modified_base (16)..(16): 2' fluoro-modified nucleoside
  modified_base (17)..(17): 2' O-methyl modified nucleoside
  modified_base (18)..(18): 2' fluoro-modified nucleoside
  modified_base (19)..(19): 2' O-methyl modified nucleoside
  misc_feature (19)..(20): Phosphorothioate linkage
  modified_base (20)..(20): 2' O-methyl modified nucleoside
  misc_feature (20)..(21): Phosphorothioate linkage
  modified_base (21)..(21): 2' O-methyl modified nucleoside
uuacgcuuucacucugagguu

SEQ ID NO: 11219 - RNA, 21 nt, Artificial Sequence
  Description of Artificial Sequence: Synthetic oligonucleotide
  modified_base (1)..(1): 2' O-methyl modified nucleoside
  misc_feature (1)..(2): Phosphorothioate linkage
  modified_base (2)..(2): 2' fluoro-modified nucleoside
  misc_feature (2)..(3): Phosphorothioate linkage
  modified_base (3)..(3): 2' O-methyl modified nucleoside
  modified_base (4)..(4): 2' fluoro-modified nucleoside
  modified_base (5)..(5): 2' O-methyl modified nucleoside
  modified_base (6)..(6): 2' fluoro-modified nucleoside
  modified_base (7)..(7): 2' O-methyl modified nucleoside
  modified_base (8)..(8): 2' fluoro-modified nucleoside
  modified_base (9)..(9): 2' O-methyl modified nucleoside
  modified_base (10)..(10): 2' fluoro-modified nucleoside
  modified_base (11)..(11): 2' O-methyl modified nucleoside
  modified_base (12)..(12): 2' O-methyl modified nucleoside
  modified_base (13)..(13): 2' O-methyl modified nucleoside
  modified_base (14)..(14): 2' fluoro-modified nucleoside
  modified_base (15)..(15): 2' O-methyl modified nucleoside
  modified_base (16)..(16): 2' fluoro-modified nucleoside
  modified_base (17)..(17): 2' O-methyl modified nucleoside
  modified_base (18)..(18): 2' fluoro-modified nucleoside
  modified_base (19)..(19): 2' O-methyl modified nucleoside
  misc_feature (19)..(20): Phosphorothioate linkage
  modified_base (20)..(20): 2' O-methyl modified nucleoside
  misc_feature (20)..(21): Phosphorothioate linkage
  modified_base (21)..(21): 2' O-methyl modified nucleoside
uuuacgcuuucacucugaguu

SEQ ID NO: 11220 - RNA, 21 nt, Artificial Sequence
  Description of Artificial Sequence: Synthetic oligonucleotide
  modified_base (1)..(1): 2' O-methyl modified nucleoside
  misc_feature (1)..(2): Phosphorothioate linkage
  modified_base (2)..(2): 2' fluoro-modified nucleoside
  misc_feature (2)..(3): Phosphorothioate linkage
  modified_base (3)..(3): 2' O-methyl modified nucleoside
  modified_base (4)..(4): 2' fluoro-modified nucleoside
  modified_base (5)..(5): 2' O-methyl modified nucleoside
  modified_base (6)..(6): 2' fluoro-modified nucleoside
  modified_base (7)..(7): 2' O-methyl modified nucleoside
  modified_base (8)..(8): 2' fluoro-modified nucleoside
  modified_base (9)..(9): 2' O-methyl modified nucleoside
  modified_base (10)..(10): 2' fluoro-modified nucleoside
  modified_base (11)..(11): 2' O-methyl modified nucleoside
  modified_base (12)..(12): 2' O-methyl modified nucleoside
  modified_base (13)..(13): 2' O-methyl modified nucleoside
  modified_base (14)..(14): 2' fluoro-modified nucleoside
  modified_base (15)..(15): 2' O-methyl modified nucleoside
  modified_base (16)..(16): 2' fluoro-modified nucleoside
  modified_base (17)..(17): 2' O-methyl modified nucleoside
  modified_base (18)..(18): 2' fluoro-modified nucleoside
  modified_base (19)..(19): 2' O-methyl modified nucleoside
  misc_feature (19)..(20): Phosphorothioate linkage
  modified_base (20)..(20): 2' O-methyl modified nucleoside
  misc_feature (20)..(21): Phosphorothioate linkage
  modified_base (21)..(21): 2' O-methyl modified nucleoside
uccuuacgcuuucacucuguu

SEQ ID NO: 11221 - RNA, 21 nt, Artificial Sequence
  Description of Artificial Sequence: Synthetic oligonucleotide
  modified_base (1)..(1): 2' O-methyl modified nucleoside
  misc_feature (1)..(2): Phosphorothioate linkage
  modified_base (2)..(2): 2' fluoro-modified nucleoside
  misc_feature (2)..(3): Phosphorothioate linkage
  modified_base (3)..(3): 2' O-methyl modified nucleoside
  modified_base (4)..(4): 2' fluoro-modified nucleoside
  modified_base (5)..(5): 2' O-methyl modified nucleoside
  modified_base (6)..(6): 2' fluoro-modified nucleoside
  modified_base (7)..(7): 2' O-methyl modified nucleoside
  modified_base (8)..(8): 2' fluoro-modified nucleoside
  modified_base (9)..(9): 2' O-methyl modified nucleoside
  modified_base (10)..(10): 2' fluoro-modified nucleoside
  modified_base (11)..(11): 2' O-methyl modified nucleoside
  modified_base (12)..(12): 2' O-methyl modified nucleoside
  modified_base (13)..(13): 2' O-methyl modified nucleoside
  modified_base (14)..(14): 2' fluoro-modified nucleoside
  modified_base (15)..(15): 2' O-methyl modified nucleoside
  modified_base (16)..(16): 2' fluoro-modified nucleoside
  modified_base (17)..(17): 2' O-methyl modified nucleoside
  modified_base (18)..(18): 2' fluoro-modified nucleoside
  modified_base (19)..(19): 2' O-methyl modified nucleoside
  misc_feature (19)..(20): Phosphorothioate linkage
  modified_base (20)..(20): 2' O-methyl modified nucleoside
  misc_feature (20)..(21): Phosphorothioate linkage
  modified_base (21)..(21): 2' O-methyl modified nucleoside
uaccuuacgcuuucacucuuu

SEQ ID NO: 11222 - RNA, 21 nt, Artificial Sequence
  Description of Artificial Sequence: Synthetic oligonucleotide
  modified_base (1)..(1): 2' O-methyl modified nucleoside
  misc_feature (1)..(2): Phosphorothioate linkage
  modified_base (2)..(2): 2' fluoro-modified nucleoside
  misc_feature (2)..(3): Phosphorothioate linkage
  modified_base (3)..(3): 2' O-methyl modified nucleoside
  modified_base (4)..(4): 2' fluoro-modified nucleoside
  modified_base (5)..(5): 2' O-methyl modified nucleoside
  modified_base (6)..(6): 2' fluoro-modified nucleoside
  modified_base (7)..(7): 2' O-methyl modified nucleoside
  modified_base (8)..(8): 2' fluoro-modified nucleoside
  modified_base (9)..(9): 2' O-methyl modified nucleoside
  modified_base (10)..(10): 2' fluoro-modified nucleoside
  modified_base (11)..(11): 2' O-methyl modified nucleoside
  modified_base (12)..(12): 2' O-methyl modified nucleoside
  modified_base (13)..(13): 2' O-methyl modified nucleoside
  modified_base (14)..(14): 2' fluoro-modified nucleoside
  modified_base (15)..(15): 2' O-methyl modified nucleoside
  modified_base (16)..(16): 2' fluoro-modified nucleoside
  modified_base (17)..(17): 2' O-methyl modified nucleoside
  modified_base (18)..(18): 2' fluoro-modified nucleoside
  modified_base (19)..(19): 2' O-methyl modified nucleoside
  misc_feature (19)..(20): Phosphorothioate linkage
  modified_base (20)..(20): 2' O-methyl modified nucleoside
  misc_feature (20)..(21): Phosphorothioate linkage
  modified_base (21)..(21): 2' O-methyl modified nucleoside
uaaccuuacgcuuucacucuu

SEQ ID NO: 11223 - RNA, 21 nt, Artificial Sequence
  Description of Artificial Sequence: Synthetic oligonucleotide
  modified_base (1)..(1): 2' O-methyl modified nucleoside
  misc_feature (1)..(2): Phosphorothioate linkage
  modified_base (2)..(2): 2' fluoro-modified nucleoside
  misc_feature (2)..(3): Phosphorothioate linkage
  modified_base (3)..(3): 2' O-methyl modified nucleoside
  modified_base (4)..(4): 2' fluoro-modified nucleoside
  modified_base (5)..(5): 2' O-methyl modified nucleoside
  modified_base (6)..(6): 2' fluoro-modified nucleoside
  modified_base (7)..(7): 2' O-methyl modified nucleoside
  modified_base (8)..(8): 2' fluoro-modified nucleoside
  modified_base (9)..(9): 2' O-methyl modified nucleoside
  modified_base (10)..(10): 2' fluoro-modified nucleoside
  modified_base (11)..(11): 2' O-methyl modified nucleoside
  modified_base (12)..(12): 2' O-methyl modified nucleoside
  modified_base (13)..(13): 2' O-methyl modified nucleoside
  modified_base (14)..(14): 2' fluoro-modified nucleoside
  modified_base (15)..(15): 2' O-methyl modified nucleoside
  modified_base (16)..(16): 2' fluoro-modified nucleoside
  modified_base (17)..(17): 2' O-methyl modified nucleoside
  modified_base (18)..(18): 2' fluoro-modified nucleoside
  modified_base (19)..(19): 2' O-methyl modified nucleoside
  misc_feature (19)..(20): Phosphorothioate linkage
  modified_base (20)..(20): 2' O-methyl modified nucleoside
  misc_feature (20)..(21): Phosphorothioate linkage
  modified_base (21)..(21): 2' O-methyl modified nucleoside
ugaaccuuacgcuuucacuuu

SEQ ID NO: 11224 - RNA, 21 nt, Artificial Sequence
  Description of Artificial Sequence: Synthetic oligonucleotide
  modified_base (1)..(1): 2' O-methyl modified nucleoside
  misc_feature (1)..(2): Phosphorothioate linkage
  modified_base (2)..(2): 2' fluoro-modified nucleoside
  misc_feature (2)..(3): Phosphorothioate linkage
  modified_base (3)..(3): 2' O-methyl modified nucleoside
  modified_base (4)..(4): 2' fluoro-modified nucleoside
  modified_base (5)..(5): 2' O-methyl modified nucleoside
  modified_base (6)..(6): 2' fluoro-modified nucleoside
  modified_base (7)..(7): 2' O-methyl modified nucleoside
  modified_base (8)..(8): 2' fluoro-modified nucleoside
  modified_base (9)..(9): 2' O-methyl modified nucleoside
  modified_base (10)..(10): 2' fluoro-modified nucleoside
  modified_base (11)..(11): 2' O-methyl modified nucleoside
  modified_base (12)..(12): 2' O-methyl modified nucleoside
  modified_base (13)..(13): 2' O-methyl modified nucleoside
  modified_base (14)..(14): 2' fluoro-modified nucleoside
  modified_base (15)..(15): 2' O-methyl modified nucleoside
  modified_base (16)..(16): 2' fluoro-modified nucleoside
  modified_base (17)..(17): 2' O-methyl modified nucleoside
  modified_base (18)..(18): 2' fluoro-modified nucleoside
  modified_base (19)..(19): 2' O-methyl modified nucleoside
  misc_feature (19)..(20): Phosphorothioate linkage
  modified_base (20)..(20): 2' O-methyl modified nucleoside
  misc_feature (20)..(21): Phosphorothioate linkage
  modified_base (21)..(21): 2' O-methyl modified nucleoside
ugcugacugaaccuuacgcuu

SEQ ID NO: 11225 - RNA, 21 nt, Artificial Sequence
  Description of Artificial Sequence: Synthetic oligonucleotide
  modified_base (1)..(1): 2' O-methyl modified nucleoside
  misc_feature (1)..(2): Phosphorothioate linkage
  modified_base (2)..(2): 2' fluoro-modified nucleoside
  misc_feature (2)..(3): Phosphorothioate linkage
  modified_base (3)..(3): 2' O-methyl modified nucleoside
  modified_base (4)..(4): 2' fluoro-modified nucleoside
  modified_base (5)..(5): 2' O-methyl modified nucleoside
  modified_base (6)..(6): 2' fluoro-modified nucleoside
  modified_base (7)..(7): 2' O-methyl modified nucleoside
  modified_base (8)..(8): 2' fluoro-modified nucleoside
  modified_base (9)..(9): 2' O-methyl modified nucleoside
  modified_base (10)..(10): 2' fluoro-modified nucleoside
  modified_base (11)..(11): 2' O-methyl modified nucleoside
  modified_base (12)..(12): 2' O-methyl modified nucleoside
  modified_base (13)..(13): 2' O-methyl modified nucleoside
  modified_base (14)..(14): 2' fluoro-modified nucleoside
  modified_base (15)..(15): 2' O-methyl modified nucleoside
  modified_base (16)..(16): 2' fluoro-modified nucleoside
  modified_base (17)..(17): 2' O-methyl modified nucleoside
  modified_base (18)..(18): 2' fluoro-modified nucleoside
  modified_base (19)..(19): 2' O-methyl modified nucleoside
  misc_feature (19)..(20): Phosphorothioate linkage
  modified_base (20)..(20): 2' O-methyl modified nucleoside
  misc_feature (20)..(21): Phosphorothioate linkage
  modified_base (21)..(21): 2' O-methyl modified nucleoside
uuuuuguggguuugggugauu

SEQ ID NO: 11226 - RNA, 21 nt, Artificial Sequence
  Description of Artificial Sequence: Synthetic oligonucleotide
  modified_base (1)..(1): 2' O-methyl modified nucleoside
  misc_feature (1)..(2): Phosphorothioate linkage
  modified_base (2)..(2): 2' fluoro-modified nucleoside
  misc_feature (2)..(3): Phosphorothioate linkage
  modified_base (3)..(3): 2' O-methyl modified nucleoside
  modified_base (4)..(4): 2' fluoro-modified nucleoside
  modified_base (5)..(5): 2' O-methyl modified nucleoside
  modified_base (6)..(6): 2' fluoro-modified nucleoside
  modified_base (7)..(7): 2' O-methyl modified nucleoside
  modified_base (8)..(8): 2' fluoro-modified nucleoside
  modified_base (9)..(9): 2' O-methyl modified nucleoside
  modified_base (10)..(10): 2' fluoro-modified nucleoside
  modified_base (11)..(11): 2' O-methyl modified nucleoside
  modified_base (12)..(12): 2' O-methyl modified nucleoside
  modified_base (13)..(13): 2' O-methyl modified nucleoside
  modified_base (14)..(14): 2' fluoro-modified nucleoside
  modified_base (15)..(15): 2' O-methyl modified nucleoside
  modified_base (16)..(16): 2' fluoro-modified nucleoside
  modified_base (17)..(17): 2' O-methyl modified nucleoside
  modified_base (18)..(18): 2' fluoro-modified nucleoside
  modified_base (19)..(19): 2' O-methyl modified nucleoside
  misc_feature (19)..(20): Phosphorothioate linkage
  modified_base (20)..(20): 2' O-methyl modified nucleoside
  misc_feature (20)..(21): Phosphorothioate linkage
  modified_base (21)..(21): 2' O-methyl modified nucleoside
ucgaugaaaaugcagagccuu

SEQ ID NO: 11227 - RNA, 21 nt, Artificial Sequence
  Description of Artificial Sequence: Synthetic oligonucleotide
  modified_base (1)..(1): 2' O-methyl modified nucleoside
  misc_feature (1)..(2): Phosphorothioate linkage
  modified_base (2)..(2): 2' fluoro-modified nucleoside
  misc_feature (2)..(3): Phosphorothioate linkage
  modified_base (3)..(3): 2' O-methyl modified nucleoside
  modified_base (4)..(4): 2' fluoro-modified nucleoside
  modified_base (5)..(5): 2' O-methyl modified nucleoside
  modified_base (6)..(6): 2' fluoro-modified nucleoside
  modified_base (7)..(7): 2' O-methyl modified nucleoside
  modified_base (8)..(8): 2' fluoro-modified nucleoside
  modified_base (9)..(9): 2' O-methyl modified nucleoside
  modified_base (10)..(10): 2' fluoro-modified nucleoside
  modified_base (11)..(11): 2' O-methyl modified nucleoside
  modified_base (12)..(12): 2' O-methyl modified nucleoside
  modified_base (13)..(13): 2' O-methyl modified nucleoside
  modified_base (14)..(14): 2' fluoro-modified nucleoside
  modified_base (15)..(15): 2' O-methyl modified nucleoside
  modified_base (16)..(16): 2' fluoro-modified nucleoside
  modified_base (17)..(17): 2' O-methyl modified nucleoside
  modified_base (18)..(18): 2' fluoro-modified nucleoside
  modified_base (19)..(19): 2' O-methyl modified nucleoside
  misc_feature (19)..(20): Phosphorothioate linkage
  modified_base (20)..(20): 2' O-methyl modified nucleoside
  misc_feature (20)..(21): Phosphorothioate linkage
  modified_base (21)..(21): 2' O-methyl modified nucleoside
ugcugacaaaggccacgauuu

SEQ ID NO: 11228 - RNA, 21 nt, Artificial Sequence
  Description of Artificial Sequence: Synthetic oligonucleotide
  modified_base (1)..(1): 2' O-methyl modified nucleoside
  misc_feature (1)..(2): Phosphorothioate linkage
  modified_base (2)..(2): 2' fluoro-modified nucleoside
  misc_feature (2)..(3): Phosphorothioate linkage
  modified_base (3)..(3): 2' O-methyl modified nucleoside
  modified_base (4)..(4): 2' fluoro-modified nucleoside
  modified_base (5)..(5): 2' O-methyl modified nucleoside
  modified_base (6)..(6): 2' fluoro-modified nucleoside
  modified_base (7)..(7): 2' O-methyl modified nucleoside
  modified_base (8)..(8): 2' fluoro-modified nucleoside
  modified_base (9)..(9): 2' O-methyl modified nucleoside
  modified_base (10)..(10): 2' fluoro-modified nucleoside
  modified_base (11)..(11): 2' O-methyl modified nucleoside
  modified_base (12)..(12): 2' O-methyl modified nucleoside
  modified_base (13)..(13): 2' O-methyl modified nucleoside
  modified_base (14)..(14): 2' fluoro-modified nucleoside
  modified_base (15)..(15): 2' O-methyl modified nucleoside
  modified_base (16)..(16): 2' fluoro-modified nucleoside
  modified_base (17)..(17): 2' O-methyl modified nucleoside
  modified_base (18)..(18): 2' fluoro-modified nucleoside
  modified_base (19)..(19): 2' O-methyl modified nucleoside
  misc_feature (19)..(20): Phosphorothioate linkage
  modified_base (20)..(20): 2' O-methyl modified nucleoside
  misc_feature (20)..(21): Phosphorothioate linkage
  modified_base (21)..(21): 2' O-methyl modified nucleoside
uggcugacaaaggccacgauu

SEQ ID NO: 11229 - RNA, 21 nt, Artificial Sequence
  Description of Artificial Sequence: Synthetic oligonucleotide
  modified_base (1)..(1): 2' O-methyl modified nucleoside
  misc_feature (1)..(2): Phosphorothioate linkage
  modified_base (2)..(2): 2' fluoro-modified nucleoside
  misc_feature (2)..(3): Phosphorothioate linkage
  modified_base (3)..(3): 2' O-methyl modified nucleoside
  modified_base (4)..(4): 2' fluoro-modified nucleoside
  modified_base (5)..(5): 2' O-methyl modified nucleoside
  modified_base (6)..(6): 2' fluoro-modified nucleoside
  modified_base (7)..(7): 2' O-methyl modified nucleoside
  modified_base (8)..(8): 2' fluoro-modified nucleoside
  modified_base (9)..(9): 2' O-methyl modified nucleoside
  modified_base (10)..(10): 2' fluoro-modified nucleoside
  modified_base (11)..(11): 2' O-methyl modified nucleoside
  modified_base (12)..(12): 2' O-methyl modified nucleoside
  modified_base (13)..(13): 2' O-methyl modified nucleoside
  modified_base (14)..(14): 2' fluoro-modified nucleoside
  modified_base (15)..(15): 2' O-methyl modified nucleoside
  modified_base (16)..(16): 2' fluoro-modified nucleoside
  modified_base (17)..(17): 2' O-methyl modified nucleoside
  modified_base (18)..(18): 2' fluoro-modified nucleoside
  modified_base (19)..(19): 2' O-methyl modified nucleoside
  misc_feature (19)..(20): Phosphorothioate linkage
  modified_base (20)..(20): 2' O-methyl modified nucleoside
  misc_feature (20)..(21): Phosphorothioate linkage
  modified_base (21)..(21): 2' O-methyl modified nucleoside
ugcgacuccaugcgcuugcuu

SEQ ID NO: 11230 - RNA, 21 nt, Artificial Sequence
  Description of Artificial Sequence: Synthetic oligonucleotide
  modified_base (1)..(1): 2' O-methyl modified nucleoside
  misc_feature (1)..(2): Phosphorothioate linkage
  modified_base (2)..(2): 2' fluoro-modified nucleoside
  misc_feature (2)..(3): Phosphorothioate linkage
  modified_base (3)..(3): 2' O-methyl modified nucleoside
  modified_base (4)..(4): 2' fluoro-modified nucleoside
  modified_base (5)..(5): 2' O-methyl modified nucleoside
  modified_base (6)..(6): 2' fluoro-modified nucleoside
  modified_base (7)..(7): 2' O-methyl modified nucleoside
  modified_base (8)..(8): 2' fluoro-modified nucleoside
  modified_base (9)..(9): 2' O-methyl modified nucleoside
  modified_base (10)..(10): 2' fluoro-modified nucleoside
  modified_base (11)..(11): 2' O-methyl modified nucleoside
  modified_base (12)..(12): 2' O-methyl modified nucleoside
  modified_base (13)..(13): 2' O-methyl modified nucleoside
  modified_base (14)..(14): 2' fluoro-modified nucleoside
  modified_base (15)..(15): 2' O-methyl modified nucleoside
  modified_base (16)..(16): 2' fluoro-modified nucleoside
  modified_base (17)..(17): 2' O-methyl modified nucleoside
  modified_base (18)..(18): 2' fluoro-modified nucleoside
  modified_base (19)..(19): 2' O-methyl modified nucleoside
  misc_feature (19)..(20): Phosphorothioate linkage
  modified_base (20)..(20): 2' O-methyl modified nucleoside
  misc_feature (20)..(21): Phosphorothioate linkage
  modified_base (21)..(21): 2' O-methyl modified nucleoside
ucgcgacuccaugcgcuuguu

SEQ ID NO: 11231 - RNA, 21 nt, Artificial Sequence
  Description of Artificial Sequence: Synthetic oligonucleotide
  modified_base (1)..(1): 2' O-methyl modified nucleoside
  misc_feature (1)..(2): Phosphorothioate linkage
  modified_base (2)..(2): 2' fluoro-modified nucleoside
  misc_feature (2)..(3): Phosphorothioate linkage
  modified_base (3)..(3): 2' O-methyl modified nucleoside
  modified_base (4)..(4): 2' fluoro-modified nucleoside
  modified_base (5)..(5): 2' O-methyl modified nucleoside
  modified_base (6)..(6): 2' fluoro-modified nucleoside
  modified_base (7)..(7): 2' O-methyl modified nucleoside
  modified_base (8)..(8): 2' fluoro-modified nucleoside
  modified_base (9)..(9): 2' O-methyl modified nucleoside
  modified_base (10)..(10): 2' fluoro-modified nucleoside
  modified_base (11)..(11): 2' O-methyl modified nucleoside
  modified_base (12)..(12): 2' O-methyl modified nucleoside
  modified_base (13)..(13): 2' O-methyl modified nucleoside
  modified_base (14)..(14): 2' fluoro-modified nucleoside
  modified_base (15)..(15): 2' O-methyl modified nucleoside
  modified_base (16)..(16): 2' fluoro-modified nucleoside
  modified_base (17)..(17): 2' O-methyl modified nucleoside
  modified_base (18)..(18): 2' fluoro-modified nucleoside
  modified_base (19)..(19): 2' O-methyl modified nucleoside
  misc_feature (19)..(20): Phosphorothioate linkage
  modified_base (20)..(20): 2' O-methyl modified nucleoside
  misc_feature (20)..(21): Phosphorothioate linkage
  modified_base (21)..(21): 2' O-methyl modified nucleoside
uccgcgacuccaugcgcuuuu

SEQ ID NO: 11232 - RNA, 21 nt, Artificial Sequence
  Description of Artificial Sequence: Synthetic oligonucleotide
  modified_base (1)..(1): 2' O-methyl modified nucleoside
  misc_feature (1)..(2): Phosphorothioate linkage
  modified_base (2)..(2): 2' fluoro-modified nucleoside
  misc_feature (2)..(3): Phosphorothioate linkage
  modified_base (3)..(3): 2' O-methyl modified nucleoside
  modified_base (4)..(4): 2' fluoro-modified nucleoside
  modified_base (5)..(5): 2' O-methyl modified nucleoside
  modified_base (6)..(6): 2' fluoro-modified nucleoside
  modified_base (7)..(7): 2' O-methyl modified nucleoside
  modified_base (8)..(8): 2' fluoro-modified nucleoside
  modified_base (9)..(9): 2' O-methyl modified nucleoside
  modified_base (10)..(10): 2' fluoro-modified nucleoside
  modified_base (11)..(11): 2' O-methyl modified nucleoside
  modified_base (12)..(12): 2' O-methyl modified nucleoside
  modified_base (13)..(13): 2' O-methyl modified nucleoside
  modified_base (14)..(14): 2' fluoro-modified nucleoside
  modified_base (15)..(15): 2' O-methyl modified nucleoside
  modified_base (16)..(16): 2' fluoro-modified nucleoside
  modified_base (17)..(17): 2' O-methyl modified nucleoside
  modified_base (18)..(18): 2' fluoro-modified nucleoside
  modified_base (19)..(19): 2' O-methyl modified nucleoside
  misc_feature (19)..(20): Phosphorothioate linkage
  modified_base (20)..(20): 2' O-methyl modified nucleoside
  misc_feature (20)..(21): Phosphorothioate linkage
  modified_base (21)..(21): 2' O-methyl modified nucleoside
uucugugagccgcgacuccuu

SEQ ID NO: 11233 - RNA, 21 nt, Artificial Sequence
  Description of Artificial Sequence: Synthetic oligonucleotide
  modified_base (1)..(1): 2' O-methyl modified nucleoside
  misc_feature (1)..(2): Phosphorothioate linkage
  modified_base (2)..(2): 2' fluoro-modified nucleoside
  misc_feature (2)..(3): Phosphorothioate linkage
  modified_base (3)..(3): 2' O-methyl modified nucleoside
  modified_base (4)..(4): 2' fluoro-modified nucleoside
  modified_base (5)..(5): 2' O-methyl modified nucleoside
  modified_base (6)..(6): 2' fluoro-modified nucleoside
  modified_base (7)..(7): 2' O-methyl modified nucleoside
  modified_base (8)..(8): 2' fluoro-modified nucleoside
  modified_base (9)..(9): 2' O-methyl modified nucleoside
  modified_base (10)..(10): 2' fluoro-modified nucleoside
  modified_base (11)..(11): 2' O-methyl modified nucleoside
  modified_base (12)..(12): 2' O-methyl modified nucleoside
  modified_base (13)..(13): 2' O-methyl modified nucleoside
  modified_base (14)..(14): 2' fluoro-modified nucleoside
  modified_base (15)..(15): 2' O-methyl modified nucleoside
  modified_base (16)..(16): 2' fluoro-modified nucleoside
  modified_base (17)..(17): 2' O-methyl modified nucleoside
  modified_base (18)..(18): 2' fluoro-modified nucleoside
  modified_base (19)..(19): 2' O-methyl modified nucleoside
  misc_feature (19)..(20): Phosphorothioate linkage
  modified_base (20)..(20): 2' O-methyl modified nucleoside
  misc_feature (20)..(21): Phosphorothioate linkage
  modified_base (21)..(21): 2' O-methyl modified nucleoside
uaucugugagccgcgacucuu

SEQ ID NO: 11234 - RNA, 21 nt, Artificial Sequence
  Description of Artificial Sequence: Synthetic oligonucleotide
  modified_base (1)..(1): 2' O-methyl modified nucleoside
  misc_feature (1)..(2): Phosphorothioate linkage
  modified_base (2)..(2): 2' fluoro-modified nucleoside
  misc_feature (2)..(3): Phosphorothioate linkage
  modified_base (3)..(3): 2' O-methyl modified nucleoside
  modified_base (4)..(4): 2' fluoro-modified nucleoside
  modified_base (5)..(5): 2' O-methyl modified nucleoside
  modified_base (6)..(6): 2' fluoro-modified nucleoside
  modified_base (7)..(7): 2' O-methyl modified nucleoside
  modified_base (8)..(8): 2' fluoro-modified nucleoside
  modified_base (9)..(9): 2' O-methyl modified nucleoside
  modified_base (10)..(10): 2' fluoro-modified nucleoside
  modified_base (11)..(11): 2' O-methyl modified nucleoside
  modified_base (12)..(12): 2' O-methyl modified nucleoside
  modified_base (13)..(13): 2' O-methyl modified nucleoside
  modified_base (14)..(14): 2' fluoro-modified nucleoside
  modified_base (15)..(15): 2' O-methyl modified nucleoside
  modified_base (16)..(16): 2' fluoro-modified nucleoside
  modified_base (17)..(17): 2' O-methyl modified nucleoside
  modified_base (18)..(18): 2' fluoro-modified nucleoside
  modified_base (19)..(19): 2' O-methyl modified nucleoside
  misc_feature (19)..(20): Phosphorothioate linkage
  modified_base (20)..(20): 2' O-methyl modified nucleoside
  misc_feature (20)..(21): Phosphorothioate linkage
  modified_base (21)..(21): 2' O-methyl modified nucleoside
ugcaucugugagccgcgacuu

SEQ ID NO: 11235 - RNA, 21 nt, Artificial Sequence
  Description of Artificial Sequence: Synthetic oligonucleotide
  modified_base (1)..(1): 2' O-methyl modified nucleoside
  misc_feature (1)..(2): Phosphorothioate linkage
  modified_base (2)..(2): 2' fluoro-modified nucleoside
  misc_feature (2)..(3): Phosphorothioate linkage
  modified_base (3)..(3): 2' O-methyl modified nucleoside
  modified_base (4)..(4): 2' fluoro-modified nucleoside
  modified_base (5)..(5): 2' O-methyl modified nucleoside
  modified_base (6)..(6): 2' fluoro-modified nucleoside
  modified_base (7)..(7): 2' O-methyl modified nucleoside
  modified_base (8)..(8): 2' fluoro-modified nucleoside
  modified_base (9)..(9): 2' O-methyl modified nucleoside
  modified_base (10)..(10): 2' fluoro-modified nucleoside
  modified_base (11)..(11): 2' O-methyl modified nucleoside
  modified_base (12)..(12): 2' O-methyl modified nucleoside
  modified_base (13)..(13): 2' O-methyl modified nucleoside
  modified_base (14)..(14): 2' fluoro-modified nucleoside
  modified_base (15)..(15): 2' O-methyl modified nucleoside
  modified_base (16)..(16): 2' fluoro-modified nucleoside
  modified_base (17)..(17): 2' O-methyl modified nucleoside
  modified_base (18)..(18): 2' fluoro-modified nucleoside
  modified_base (19)..(19): 2' O-methyl modified nucleoside
  misc_feature (19)..(20): Phosphorothioate linkage
  modified_base (20)..(20): 2' O-methyl modified nucleoside
  misc_feature (20)..(21): Phosphorothioate linkage
  modified_base (21)..(21): 2' O-methyl modified nucleoside
ugaggucugagugaccgucuu

SEQ ID NO: 11236 - RNA, 21 nt, Artificial Sequence
  Description of Artificial Sequence: Synthetic oligonucleotide
  modified_base (1)..(1): 2' O-methyl modified nucleoside
  misc_feature (1)..(2): Phosphorothioate linkage
  modified_base (2)..(2): 2' fluoro-modified nucleoside
  misc_feature (2)..(3): Phosphorothioate linkage
  modified_base (3)..(3): 2' O-methyl modified nucleoside
  modified_base (4)..(4): 2' fluoro-modified nucleoside
  modified_base (5)..(5): 2' O-methyl modified nucleoside
  modified_base (6)..(6): 2' fluoro-modified nucleoside
  modified_base (7)..(7): 2' O-methyl modified nucleoside
  modified_base (8)..(8): 2' fluoro-modified nucleoside
  modified_base (9)..(9): 2' O-methyl modified nucleoside
  modified_base (10)..(10): 2' fluoro-modified nucleoside
  modified_base (11)..(11): 2' O-methyl modified nucleoside
  modified_base (12)..(12): 2' O-methyl modified nucleoside
  modified_base (13)..(13): 2' O-methyl modified nucleoside
  modified_base (14)..(14): 2' fluoro-modified nucleoside
  modified_base (15)..(15): 2' O-methyl modified nucleoside
  modified_base (16)..(16): 2' fluoro-modified nucleoside
  modified_base (17)..(17): 2' O-methyl modified nucleoside
  modified_base (18)..(18): 2' fluoro-modified nucleoside
  modified_base (19)..(19): 2' O-methyl modified nucleoside
  misc_feature (19)..(20): Phosphorothioate linkage
  modified_base (20)..(20): 2' O-methyl modified nucleoside
  misc_feature (20)..(21): Phosphorothioate linkage
  modified_base (21)..(21): 2' O-methyl modified nucleoside
ucaucugcggaggucugaguu

SEQ ID NO: 11237 - RNA, 21 nt, Artificial Sequence
  Description of Artificial Sequence: Synthetic oligonucleotide
  modified_base (1)..(1): 2' O-methyl modified nucleoside
  misc_feature (1)..(2): Phosphorothioate linkage
  modified_base (2)..(2): 2' fluoro-modified nucleoside
  misc_feature (2)..(3): Phosphorothioate linkage
  modified_base (3)..(3): 2' O-methyl modified nucleoside
  modified_base (4)..(4): 2' fluoro-modified nucleoside
  modified_base (5)..(5): 2' O-methyl modified nucleoside
  modified_base (6)..(6): 2' fluoro-modified nucleoside
  modified_base (7)..(7): 2' O-methyl modified nucleoside
  modified_base (8)..(8): 2' fluoro-modified nucleoside
  modified_base (9)..(9): 2' O-methyl modified nucleoside
  modified_base (10)..(10): 2' fluoro-modified nucleoside
  modified_base (11)..(11): 2' O-methyl modified nucleoside
  modified_base (12)..(12): 2' O-methyl modified nucleoside
  modified_base (13)..(13): 2' O-methyl modified nucleoside
  modified_base (14)..(14): 2' fluoro-modified nucleoside
  modified_base (15)..(15): 2' O-methyl modified nucleoside
  modified_base (16)..(16): 2' fluoro-modified nucleoside
  modified_base (17)..(17): 2' O-methyl modified nucleoside
  modified_base (18)..(18): 2' fluoro-modified nucleoside
  modified_base (19)..(19): 2' O-methyl modified nucleoside
  misc_feature (19)..(20): Phosphorothioate linkage
  modified_base (20)..(20): 2' O-methyl modified nucleoside
  misc_feature (20)..(21): Phosphorothioate linkage
  modified_base (21)..(21): 2' O-methyl modified nucleoside
ugcaucugcggaggucugauu

SEQ ID NO: 11238 - RNA, 21 nt, Artificial Sequence
  Description of Artificial Sequence: Synthetic oligonucleotide
  modified_base (1)..(1): 2' O-methyl modified nucleoside
  misc_feature (1)..(2): Phosphorothioate linkage
  modified_base (2)..(2): 2' fluoro-modified nucleoside
  misc_feature (2)..(3): Phosphorothioate linkage
  modified_base (3)..(3): 2' O-methyl modified nucleoside
  modified_base (4)..(4): 2' fluoro-modified nucleoside
  modified_base (5)..(5): 2' O-methyl modified nucleoside
  modified_base (6)..(6): 2' fluoro-modified nucleoside
  modified_base (7)..(7): 2' O-methyl modified nucleoside
  modified_base (8)..(8): 2' fluoro-modified nucleoside
  modified_base (9)..(9): 2' O-methyl modified nucleoside
  modified_base (10)..(10): 2' fluoro-modified nucleoside
  modified_base (11)..(11): 2' O-methyl modified nucleoside
  modified_base (12)..(12): 2' O-methyl modified nucleoside
  modified_base (13)..(13): 2' O-methyl modified nucleoside
  modified_base (14)..(14): 2' fluoro-modified nucleoside
  modified_base (15)..(15): 2' O-methyl modified nucleoside
  modified_base (16)..(16): 2' fluoro-modified nucleoside
  modified_base (17)..(17): 2' O-methyl modified nucleoside
  modified_base (18)..(18): 2' fluoro-modified nucleoside
  modified_base (19)..(19): 2' O-methyl modified nucleoside
  misc_feature (19)..(20): Phosphorothioate linkage
  modified_base (20)..(20): 2' O-methyl modified nucleoside
  misc_feature (20)..(21): Phosphorothioate linkage
  modified_base (21)..(21): 2' O-methyl modified nucleoside
uagauggcaucugcggagguu

SEQ ID NO: 11239 - RNA, 21 nt, Artificial Sequence
  Description of Artificial Sequence: Synthetic oligonucleotide
  modified_base (1)..(1): 2' O-methyl modified nucleoside
  misc_feature (1)..(2): Phosphorothioate linkage
  modified_base (2)..(2): 2' fluoro-modified nucleoside
  misc_feature (2)..(3): Phosphorothioate linkage
  modified_base (3)..(3): 2' O-methyl modified nucleoside
  modified_base (4)..(4): 2' fluoro-modified nucleoside
  modified_base (5)..(5): 2' O-methyl modified nucleoside
  modified_base (6)..(6): 2' fluoro-modified nucleoside
  modified_base (7)..(7): 2' O-methyl modified nucleoside
  modified_base (8)..(8): 2' fluoro-modified nucleoside
  modified_base (9)..(9): 2' O-methyl modified nucleoside
  modified_base (10)..(10): 2' fluoro-modified nucleoside
  modified_base (11)..(11): 2' O-methyl modified nucleoside
  modified_base (12)..(12): 2' O-methyl modified nucleoside
  modified_base (13)..(13): 2' O-methyl modified nucleoside
  modified_base (14)..(14): 2' fluoro-modified nucleoside
  modified_base (15)..(15): 2' O-methyl modified nucleoside
  modified_base (16)..(16): 2' fluoro-modified nucleoside
  modified_base (17)..(17): 2' O-methyl modified nucleoside
  modified_base (18)..(18): 2' fluoro-modified nucleoside
  modified_base (19)..(19): 2' O-methyl modified nucleoside
  misc_feature (19)..(20): Phosphorothioate linkage
  modified_base (20)..(20): 2' O-methyl modified nucleoside
  misc_feature (20)..(21): Phosphorothioate linkage
  modified_base (21)..(21): 2' O-methyl modified nucleoside
uuagauggcaucugcggaguu

SEQ ID NO: 11240 - RNA, 21 nt, Artificial Sequence
  Description of Artificial Sequence: Synthetic oligonucleotide
  modified_base (1)..(1): 2' O-methyl modified nucleoside
  misc_feature (1)..(2): Phosphorothioate linkage
  modified_base (2)..(2): 2' fluoro-modified nucleoside
  misc_feature (2)..(3): Phosphorothioate linkage
  modified_base (3)..(3): 2' O-methyl modified nucleoside
  modified_base (4)..(4): 2' fluoro-modified nucleoside
  modified_base (5)..(5): 2' O-methyl modified nucleoside
  modified_base (6)..(6): 2' fluoro-modified nucleoside
  modified_base (7)..(7): 2' O-methyl modified nucleoside
  modified_base (8)..(8): 2' fluoro-modified nucleoside
  modified_base (9)..(9): 2' O-methyl modified nucleoside
  modified_base (10)..(10): 2' fluoro-modified nucleoside
  modified_base (11)..(11): 2' O-methyl modified nucleoside
  modified_base (12)..(12): 2' O-methyl modified nucleoside
  modified_base (13)..(13): 2' O-methyl modified nucleoside
  modified_base (14)..(14): 2' fluoro-modified nucleoside
  modified_base (15)..(15): 2' O-methyl modified nucleoside
  modified_base (16)..(16): 2' fluoro-modified nucleoside
  modified_base (17)..(17): 2' O-methyl modified nucleoside
  modified_base (18)..(18): 2' fluoro-modified nucleoside
  modified_base (19)..(19): 2' O-methyl modified nucleoside
  misc_feature (19)..(20): Phosphorothioate linkage
  modified_base (20)..(20): 2' O-methyl modified nucleoside
  misc_feature (20)..(21): Phosphorothioate linkage
  modified_base (21)..(21): 2' O-methyl modified nucleoside
ucguagauggcaucugcgguu

SEQ ID NO: 11241 - RNA, 21 nt, Artificial Sequence
  Description of Artificial Sequence: Synthetic oligonucleotide
  modified_base (1)..(1): 2' O-methyl modified nucleoside
  misc_feature (1)..(2): Phosphorothioate linkage
  modified_base (2)..(2): 2' fluoro-modified nucleoside
  misc_feature (2)..(3): Phosphorothioate linkage
  modified_base (3)..(3): 2' O-methyl modified nucleoside
  modified_base (4)..(4): 2' fluoro-modified nucleoside
  modified_base (5)..(5): 2' O-methyl modified nucleoside
  modified_base (6)..(6): 2' fluoro-modified nucleoside
  modified_base (7)..(7): 2' O-methyl modified nucleoside
  modified_base (8)..(8): 2' fluoro-modified nucleoside
  modified_base (9)..(9): 2' O-methyl modified nucleoside
  modified_base (10)..(10): 2' fluoro-modified nucleoside
  modified_base (11)..(11): 2' O-methyl modified nucleoside
  modified_base (12)..(12): 2' O-methyl modified nucleoside
  modified_base (13)..(13): 2' O-methyl modified nucleoside
  modified_base (14)..(14): 2' fluoro-modified nucleoside
  modified_base (15)..(15): 2' O-methyl modified nucleoside
  modified_base (16)..(16): 2' fluoro-modified nucleoside
  modified_base (17)..(17): 2' O-methyl modified nucleoside
  modified_base (18)..(18): 2' fluoro-modified nucleoside
  modified_base (19)..(19): 2' O-methyl modified nucleoside
  misc_feature (19)..(20): Phosphorothioate linkage
  modified_base (20)..(20): 2' O-methyl modified nucleoside
  misc_feature (20)..(21): Phosphorothioate linkage
  modified_base (21)..(21): 2' O-methyl modified nucleoside
ucagucguagauggcaucuuu

SEQ ID NO: 11242 - RNA, 21 nt, Artificial Sequence
  Description of Artificial Sequence: Synthetic oligonucleotide
  modified_base (1)..(1): 2' O-methyl modified nucleoside
  misc_feature (1)..(2): Phosphorothioate linkage
  modified_base (2)..(2): 2' fluoro-modified nucleoside
  misc_feature (2)..(3): Phosphorothioate linkage
  modified_base (3)..(3): 2' O-methyl modified nucleoside
  modified_base (4)..(4): 2' fluoro-modified nucleoside
  modified_base (5)..(5): 2' O-methyl modified nucleoside
  modified_base (6)..(6): 2' fluoro-modified nucleoside
  modified_base (7)..(7): 2' O-methyl modified nucleoside
  modified_base (8)..(8): 2' fluoro-modified nucleoside
  modified_base (9)..(9): 2' O-methyl modified nucleoside
  modified_base (10)..(10): 2' fluoro-modified nucleoside
  modified_base (11)..(11): 2' O-methyl modified nucleoside
  modified_base (12)..(12): 2' O-methyl modified nucleoside
  modified_base (13)..(13): 2' O-methyl modified nucleoside
  modified_base (14)..(14): 2' fluoro-modified nucleoside
  modified_base (15)..(15): 2' O-methyl modified nucleoside
  modified_base (16)..(16): 2' fluoro-modified nucleoside
  modified_base (17)..(17): 2' O-methyl modified nucleoside
  modified_base (18)..(18): 2' fluoro-modified nucleoside
  modified_base (19)..(19): 2' O-methyl modified nucleoside
  misc_feature (19)..(20): Phosphorothioate linkage
  modified_base (20)..(20): 2' O-methyl modified nucleoside
  misc_feature (20)..(21): Phosphorothioate linkage
  modified_base (21)..(21): 2' O-methyl modified nucleoside
ugcagucguagauggcaucuu

SEQ ID NO: 11243 - RNA, 21 nt, Artificial Sequence
  Description of Artificial Sequence: Synthetic oligonucleotide
  modified_base (1)..(1): 2' O-methyl modified nucleoside
  misc_feature (1)..(2): Phosphorothioate linkage
  modified_base (2)..(2): 2' fluoro-modified nucleoside
  misc_feature (2)..(3): Phosphorothioate linkage
  modified_base (3)..(3): 2' O-methyl modified nucleoside
  modified_base (4)..(4): 2' fluoro-modified nucleoside
  modified_base (5)..(5): 2' O-methyl modified nucleoside
  modified_base (6)..(6): 2' fluoro-modified nucleoside
  modified_base (7)..(7): 2' O-methyl modified nucleoside
  modified_base (8)..(8): 2' fluoro-modified nucleoside
  modified_base (9)..(9): 2' O-methyl modified nucleoside
  modified_base (10)..(10): 2' fluoro-modified nucleoside
  modified_base (11)..(11): 2' O-methyl modified nucleoside
  modified_base (12)..(12): 2' O-methyl modified nucleoside
  modified_base (13)..(13): 2' O-methyl modified nucleoside
  modified_base (14)..(14): 2' fluoro-modified nucleoside
  modified_base (15)..(15): 2' O-methyl modified nucleoside
  modified_base (16)..(16): 2' fluoro-modified nucleoside
  modified_base (17)..(17): 2' O-methyl modified nucleoside
  modified_base (18)..(18): 2' fluoro-modified nucleoside
  modified_base (19)..(19): 2' O-methyl modified nucleoside
  misc_feature (19)..(20): Phosphorothioate linkage
  modified_base (20)..(20): 2' O-methyl modified nucleoside
  misc_feature (20)..(21): Phosphorothioate linkage
  modified_base (21)..(21): 2' O-methyl modified nucleoside
uaagagcagucguagaugguu

SEQ ID NO: 11244 - RNA, 21 nt, Artificial Sequence
  Description of Artificial Sequence: Synthetic oligonucleotide
  modified_base (1)..(1): 2' O-methyl modified nucleoside
  misc_feature (1)..(2): Phosphorothioate linkage
  modified_base (2)..(2): 2' fluoro-modified nucleoside
  misc_feature (2)..(3): Phosphorothioate linkage
  modified_base (3)..(3): 2' O-methyl modified nucleoside
  modified_base (4)..(4): 2' fluoro-modified nucleoside
  modified_base (5)..(5): 2' O-methyl modified nucleoside
  modified_base (6)..(6): 2' fluoro-modified nucleoside
  modified_base (7)..(7): 2' O-methyl modified nucleoside
  modified_base (8)..(8): 2' fluoro-modified nucleoside
  modified_base (9)..(9): 2' O-methyl modified nucleoside
  modified_base (10)..(10): 2' fluoro-modified nucleoside
  modified_base (11)..(11): 2' O-methyl modified nucleoside
  modified_base (12)..(12): 2' O-methyl modified nucleoside
  modified_base (13)..(13): 2' O-methyl modified nucleoside
  modified_base (14)..(14): 2' fluoro-modified nucleoside
  modified_base (15)..(15): 2' O-methyl modified nucleoside
  modified_base (16)..(16): 2' fluoro-modified nucleoside
  modified_base (17)..(17): 2' O-methyl modified nucleoside
  modified_base (18)..(18): 2' fluoro-modified nucleoside
  modified_base (19)..(19): 2' O-methyl modified nucleoside
  misc_feature (19)..(20): Phosphorothioate linkage
  modified_base (20)..(20): 2' O-methyl modified nucleoside
  misc_feature (20)..(21): Phosphorothioate linkage
  modified_base (21)..(21): 2' O-methyl modified nucleoside
ugaagagcagucguagauguu

SEQ ID NO: 11245 - RNA, 21 nt, Artificial Sequence
  Description of Artificial Sequence: Synthetic oligonucleotide
  modified_base (1)..(1): 2' O-methyl modified nucleoside
  misc_feature (1)..(2): Phosphorothioate linkage
  modified_base (2)..(2): 2' fluoro-modified nucleoside
  misc_feature (2)..(3): Phosphorothioate linkage
  modified_base (3)..(3): 2' O-methyl modified nucleoside
  modified_base (4)..(4): 2' fluoro-modified nucleoside
  modified_base (5)..(5): 2' O-methyl modified nucleoside
  modified_base (6)..(6): 2' fluoro-modified nucleoside
  modified_base (7)..(7): 2' O-methyl modified nucleoside
  modified_base (8)..(8): 2' fluoro-modified nucleoside
  modified_base (9)..(9): 2' O-methyl modified nucleoside
  modified_base (10)..(10): 2' fluoro-modified nucleoside
  modified_base (11)..(11): 2' O-methyl modified nucleoside
  modified_base (12)..(12): 2' O-methyl modified nucleoside
  modified_base (13)..(13): 2' O-methyl modified nucleoside
  modified_base (14)..(14): 2' fluoro-modified nucleoside
  modified_base (15)..(15): 2' O-methyl modified nucleoside
  modified_base (16)..(16): 2' fluoro-modified nucleoside
  modified_base (17)..(17): 2' O-methyl modified nucleoside
  modified_base (18)..(18): 2' fluoro-modified nucleoside
  modified_base (19)..(19): 2' O-methyl modified nucleoside
  misc_feature (19)..(20): Phosphorothioate linkage
  modified_base (20)..(20): 2' O-methyl modified nucleoside
  misc_feature (20)..(21): Phosphorothioate linkage
  modified_base (21)..(21): 2' O-methyl modified nucleoside
uugcgguaguucuucugguuu

SEQ ID NO: 11246 - RNA, 21 nt, Artificial Sequence
  Description of Artificial Sequence: Synthetic oligonucleotide
  modified_base (1)..(1): 2' O-methyl modified nucleoside
  misc_feature (1)..(2): Phosphorothioate linkage
  modified_base (2)..(2): 2' fluoro-modified nucleoside
  misc_feature (2)..(3): Phosphorothioate linkage
  modified_base (3)..(3): 2' O-methyl modified nucleoside
  modified_base (4)..(4): 2' fluoro-modified nucleoside
  modified_base (5)..(5): 2' O-methyl modified nucleoside
  modified_base (6)..(6): 2' fluoro-modified nucleoside
  modified_base (7)..(7): 2' O-methyl modified nucleoside
  modified_base (8)..(8): 2' fluoro-modified nucleoside
  modified_base (9)..(9): 2' O-methyl modified nucleoside
  modified_base (10)..(10): 2' fluoro-modified nucleoside
  modified_base (11)..(11): 2' O-methyl modified nucleoside
  modified_base (12)..(12): 2' O-methyl modified nucleoside
  modified_base (13)..(13): 2' O-methyl modified nucleoside
  modified_base (14)..(14): 2' fluoro-modified nucleoside
  modified_base (15)..(15): 2' O-methyl modified nucleoside
  modified_base (16)..(16): 2' fluoro-modified nucleoside
  modified_base (17)..(17): 2' O-methyl modified nucleoside
  modified_base (18)..(18): 2' fluoro-modified nucleoside
  modified_base (19)..(19): 2' O-methyl modified nucleoside
  misc_feature (19)..(20): Phosphorothioate linkage
  modified_base (20)..(20): 2' O-methyl modified nucleoside
  misc_feature (20)..(21): Phosphorothioate linkage
  modified_base (21)..(21): 2' O-methyl modified nucleoside
uaugcgguaguucuucugguu

SEQ ID NO: 11247 - RNA, 21 nt, Artificial Sequence
  Description of Artificial Sequence: Synthetic oligonucleotide
  modified_base (1)..(1): 2' O-methyl modified nucleoside
  misc_feature (1)..(2): Phosphorothioate linkage
  modified_base (2)..(2): 2' fluoro-modified nucleoside
  misc_feature (2)..(3): Phosphorothioate linkage
  modified_base (3)..(3): 2' O-methyl modified nucleoside
  modified_base (4)..(4): 2' fluoro-modified nucleoside
  modified_base (5)..(5): 2' O-methyl modified nucleoside
  modified_base (6)..(6): 2' fluoro-modified nucleoside
  modified_base (7)..(7): 2' O-methyl modified nucleoside
  modified_base (8)..(8): 2' fluoro-modified nucleoside
  modified_base (9)..(9): 2' O-methyl modified nucleoside
  modified_base (10)..(10): 2' fluoro-modified nucleoside
  modified_base (11)..(11): 2' O-methyl modified nucleoside
  modified_base (12)..(12): 2' O-methyl modified nucleoside
  modified_base (13)..(13): 2' O-methyl modified nucleoside
  modified_base (14)..(14): 2' fluoro-modified nucleoside
  modified_base (15)..(15): 2' O-methyl modified nucleoside
  modified_base (16)..(16): 2' fluoro-modified nucleoside
  modified_base (17)..(17): 2' O-methyl modified nucleoside
  modified_base (18)..(18): 2' fluoro-modified nucleoside
  modified_base (19)..(19): 2' O-methyl modified nucleoside
  misc_feature (19)..(20): Phosphorothioate linkage
  modified_base (20)..(20): 2' O-methyl modified nucleoside
  misc_feature (20)..(21): Phosphorothioate linkage
  modified_base (21)..(21): 2' O-methyl modified nucleoside
uccagagaugcgguaguucuu

SEQ ID NO: 11248 - RNA, 21 nt, Artificial Sequence
  Description of Artificial Sequence: Synthetic oligonucleotide
  modified_base (1)..(1): 2' O-methyl modified nucleoside
  misc_feature (1)..(2): Phosphorothioate linkage
  modified_base (2)..(2): 2' fluoro-modified nucleoside
  misc_feature (2)..(3): Phosphorothioate linkage
  modified_base (3)..(3): 2' O-methyl modified nucleoside
  modified_base (4)..(4): 2' fluoro-modified nucleoside
  modified_base (5)..(5): 2' O-methyl modified nucleoside
  modified_base (6)..(6): 2' fluoro-modified nucleoside
  modified_base (7)..(7): 2' O-methyl modified nucleoside
  modified_base (8)..(8): 2' fluoro-modified nucleoside
  modified_base (9)..(9): 2' O-methyl modified nucleoside
  modified_base (10)..(10): 2' fluoro-modified nucleoside
  modified_base (11)..(11): 2' O-methyl modified nucleoside
  modified_base (12)..(12): 2' O-methyl modified nucleoside
  modified_base (13)..(13): 2' O-methyl modified nucleoside
  modified_base (14)..(14): 2' fluoro-modified nucleoside
  modified_base (15)..(15): 2' O-methyl modified nucleoside
  modified_base (16)..(16): 2' fluoro-modified nucleoside
  modified_base (17)..(17): 2' O-methyl modified nucleoside
  modified_base (18)..(18): 2' fluoro-modified nucleoside
  modified_base (19)..(19): 2' O-methyl modified nucleoside
  misc_feature (19)..(20): Phosphorothioate linkage
  modified_base (20)..(20): 2' O-methyl modified nucleoside
  misc_feature (20)..(21): Phosphorothioate linkage
  modified_base (21)..(21): 2' O-methyl modified nucleoside
uuacacuccagagaugcgguu

SEQ ID NO: 11249 - RNA, 21 nt, Artificial Sequence
  Description of Artificial Sequence: Synthetic oligonucleotide
  modified_base (1)..(1): 2' O-methyl modified nucleoside
  misc_feature (1)..(2): Phosphorothioate linkage
  modified_base (2)..(2): 2' fluoro-modified nucleoside
  misc_feature (2)..(3): Phosphorothioate linkage
  modified_base (3)..(3): 2' O-methyl modified nucleoside
  modified_base (4)..(4): 2' fluoro-modified nucleoside
  modified_base (5)..(5): 2' O-methyl modified nucleoside
  modified_base (6)..(6): 2' fluoro-modified nucleoside
  modified_base (7)..(7): 2' O-methyl modified nucleoside
  modified_base (8)..(8): 2' fluoro-modified nucleoside
  modified_base (9)..(9): 2' O-methyl modified nucleoside
  modified_base (10)..(10): 2' fluoro-modified nucleoside
  modified_base (11)..(11): 2' O-methyl modified nucleoside
  modified_base (12)..(12): 2' O-methyl modified nucleoside
  modified_base (13)..(13): 2' O-methyl modified nucleoside
  modified_base (14)..(14): 2' fluoro-modified nucleoside
  modified_base (15)..(15): 2' O-methyl modified nucleoside
  modified_base (16)..(16): 2' fluoro-modified nucleoside
  modified_base (17)..(17): 2' O-methyl modified nucleoside
  modified_base (18)..(18): 2' fluoro-modified nucleoside
  modified_base (19)..(19): 2' O-methyl modified nucleoside
  misc_feature (19)..(20): Phosphorothioate linkage
  modified_base (20)..(20): 2' O-methyl modified nucleoside
  misc_feature (20)..(21): Phosphorothioate linkage
  modified_base (21)..(21): 2' O-methyl modified nucleoside
uuuauacacuccagagauguu

SEQ ID NO: 11250 - RNA, 21 nt, Artificial Sequence
  Description of Artificial Sequence: Synthetic oligonucleotide
  modified_base (1)..(1): 2' O-methyl modified nucleoside
  misc_feature (1)..(2): Phosphorothioate linkage
  modified_base (2)..(2): 2' fluoro-modified nucleoside
  misc_feature (2)..(3): Phosphorothioate linkage
  modified_base (3)..(3): 2' O-methyl modified nucleoside
  modified_base (4)..(4): 2' fluoro-modified nucleoside
  modified_base (5)..(5): 2' O-methyl modified nucleoside
  modified_base (6)..(6): 2' fluoro-modified nucleoside
  modified_base (7)..(7): 2' O-methyl modified nucleoside
  modified_base (8)..(8): 2' fluoro-modified nucleoside
  modified_base (9)..(9): 2' O-methyl modified nucleoside
  modified_base (10)..(10): 2' fluoro-modified nucleoside
  modified_base (11)..(11): 2' O-methyl modified nucleoside
  modified_base (12)..(12): 2' O-methyl modified nucleoside
  modified_base (13)..(13): 2' O-methyl modified nucleoside
  modified_base (14)..(14): 2' fluoro-modified nucleoside
  modified_base (15)..(15): 2' O-methyl modified nucleoside
  modified_base (16)..(16): 2' fluoro-modified nucleoside
  modified_base (17)..(17): 2' O-methyl modified nucleoside
  modified_base (18)..(18): 2' fluoro-modified nucleoside
  modified_base (19)..(19): 2' O-methyl modified nucleoside
  misc_feature (19)..(20): Phosphorothioate linkage
  modified_base (20)..(20): 2' O-methyl modified nucleoside
  misc_feature (20)..(21): Phosphorothioate linkage
  modified_base (21)..(21): 2' O-methyl modified nucleoside
ucuuauacacuccagagauuu

SEQ ID NO: 11251 - RNA, 21 nt, Artificial Sequence
  Description of Artificial Sequence: Synthetic oligonucleotide
  modified_base (1)..(1): 2' O-methyl modified nucleoside
  misc_feature (1)..(2): Phosphorothioate linkage
  modified_base (2)..(2): 2' fluoro-modified nucleoside
  misc_feature (2)..(3): Phosphorothioate linkage
  modified_base (3)..(3): 2' O-methyl modified nucleoside
  modified_base (4)..(4): 2' fluoro-modified nucleoside
  modified_base (5)..(5): 2' O-methyl modified nucleoside
  modified_base (6)..(6): 2' fluoro-modified nucleoside
  modified_base (7)..(7): 2' O-methyl modified nucleoside
  modified_base (8)..(8): 2' fluoro-modified nucleoside
  modified_base (9)..(9): 2' O-methyl modified nucleoside
  modified_base (10)..(10): 2' fluoro-modified nucleoside
  modified_base (11)..(11): 2' O-methyl modified nucleoside
  modified_base (12)..(12): 2' O-methyl modified nucleoside
  modified_base (13)..(13): 2' O-methyl modified nucleoside
  modified_base (14)..(14): 2' fluoro-modified nucleoside
  modified_base (15)..(15): 2' O-methyl modified nucleoside
  modified_base (16)..(16): 2' fluoro-modified nucleoside
  modified_base (17)..(17): 2' O-methyl modified nucleoside
  modified_base (18)..(18): 2' fluoro-modified nucleoside
  modified_base (19)..(19): 2' O-methyl modified nucleoside
  misc_feature (19)..(20): Phosphorothioate linkage
  modified_base (20)..(20): 2' O-methyl modified nucleoside
  misc_feature (20)..(21): Phosphorothioate linkage
  modified_base (21)..(21): 2' O-methyl modified nucleoside
uucgucucuggaugaugguuu

SEQ ID NO: 11252 - RNA, 21 nt, Artificial Sequence
  Description of Artificial Sequence: Synthetic oligonucleotide
  modified_base (1)..(1): 2' O-methyl modified nucleoside
  misc_feature (1)..(2): Phosphorothioate linkage
  modified_base (2)..(2): 2' fluoro-modified nucleoside
  misc_feature (2)..(3): Phosphorothioate linkage
  modified_base (3)..(3): 2' O-methyl modified nucleoside
  modified_base (4)..(4): 2' fluoro-modified nucleoside
  modified_base (5)..(5): 2' O-methyl modified nucleoside
  modified_base (6)..(6): 2' fluoro-modified nucleoside
  modified_base (7)..(7): 2' O-methyl modified nucleoside
  modified_base (8)..(8): 2' fluoro-modified nucleoside
  modified_base (9)..(9): 2' O-methyl modified nucleoside
  modified_base (10)..(10): 2' fluoro-modified nucleoside
  modified_base (11)..(11): 2' O-methyl modified nucleoside
  modified_base (12)..(12): 2' O-methyl modified nucleoside
  modified_base (13)..(13): 2' O-methyl modified nucleoside
  modified_base (14)..(14): 2' fluoro-modified nucleoside
  modified_base (15)..(15): 2' O-methyl modified nucleoside
  modified_base (16)..(16): 2' fluoro-modified nucleoside
  modified_base (17)..(17): 2' O-methyl modified nucleoside
  modified_base (18)..(18): 2' fluoro-modified nucleoside
  modified_base (19)..(19): 2' O-methyl modified nucleoside
  misc_feature (19)..(20): Phosphorothioate linkage
  modified_base (20)..(20): 2' O-methyl modified nucleoside
  misc_feature (20)..(21): Phosphorothioate linkage
  modified_base (21)..(21): 2' O-methyl modified nucleoside
uuucgucucuggaugaugguu

SEQ ID NO: 11253 - RNA, 21 nt, Artificial Sequence
  Description of Artificial Sequence: Synthetic oligonucleotide
  modified_base (1)..(1): 2' O-methyl modified nucleoside
  misc_feature (1)..(2): Phosphorothioate linkage
  modified_base (2)..(2): 2' fluoro-modified nucleoside
  misc_feature (2)..(3): Phosphorothioate linkage
  modified_base (3)..(3): 2' O-methyl modified nucleoside
  modified_base (4)..(4): 2' fluoro-modified nucleoside
  modified_base (5)..(5): 2' O-methyl modified nucleoside
  modified_base (6)..(6): 2' fluoro-modified nucleoside
  modified_base (7)..(7): 2' O-methyl modified nucleoside
  modified_base (8)..(8): 2' fluoro-modified nucleoside
  modified_base (9)..(9): 2' O-methyl modified nucleoside
  modified_base (10)..(10): 2' fluoro-modified nucleoside
  modified_base (11)..(11): 2' O-methyl modified nucleoside
  modified_base (12)..(12): 2' O-methyl modified nucleoside
  modified_base (13)..(13): 2' O-methyl modified nucleoside
  modified_base (14)..(14): 2' fluoro-modified nucleoside
  modified_base (15)..(15): 2' O-methyl modified nucleoside
  modified_base (16)..(16): 2' fluoro-modified nucleoside
  modified_base (17)..(17): 2' O-methyl modified nucleoside
  modified_base (18)..(18): 2' fluoro-modified nucleoside
  modified_base (19)..(19): 2' O-methyl modified nucleoside
  misc_feature (19)..(20): Phosphorothioate linkage
  modified_base (20)..(20): 2' O-methyl modified nucleoside
  misc_feature (20)..(21): Phosphorothioate linkage
  modified_base (21)..(21): 2' O-methyl modified nucleoside
uuuucgucucuggaugauguu

SEQ ID NO: 11254 - RNA, 21 nt, Artificial Sequence
  Description of Artificial Sequence: Synthetic oligonucleotide
  modified_base (1)..(1): 2' O-methyl modified nucleoside
  misc_feature (1)..(2): Phosphorothioate linkage
  modified_base (2)..(2): 2' fluoro-modified nucleoside
  misc_feature (2)..(3): Phosphorothioate linkage
  modified_base (3)..(3): 2' O-methyl modified nucleoside
  modified_base (4)..(4): 2' fluoro-modified nucleoside
  modified_base (5)..(5): 2' O-methyl modified nucleoside
  modified_base (6)..(6): 2' fluoro-modified nucleoside
  modified_base (7)..(7): 2' O-methyl modified nucleoside
  modified_base (8)..(8): 2' fluoro-modified nucleoside
  modified_base (9)..(9): 2' O-methyl modified nucleoside
  modified_base (10)..(10): 2' fluoro-modified nucleoside
  modified_base (11)..(11): 2' O-methyl modified nucleoside
  modified_base (12)..(12): 2' O-methyl modified nucleoside
  modified_base (13)..(13): 2' O-methyl modified nucleoside
  modified_base (14)..(14): 2' fluoro-modified nucleoside
  modified_base (15)..(15): 2' O-methyl modified nucleoside
  modified_base (16)..(16): 2' fluoro-modified nucleoside
  modified_base (17)..(17): 2' O-methyl modified nucleoside
  modified_base (18)..(18): 2' fluoro-modified nucleoside
  modified_base (19)..(19): 2' O-methyl modified nucleoside
  misc_feature (19)..(20): Phosphorothioate linkage
  modified_base (20)..(20): 2' O-methyl modified nucleoside
  misc_feature (20)..(21): Phosphorothioate linkage
  modified_base (21)..(21): 2' O-methyl modified nucleoside
uuuuucgucucuggaugauuu

SEQ ID NO: 11255 - RNA, 21 nt, Artificial Sequence
  Description of Artificial Sequence: Synthetic oligonucleotide
  modified_base (1)..(1): 2' O-methyl modified nucleoside
  misc_feature (1)..(2): Phosphorothioate linkage
  modified_base (2)..(2): 2' fluoro-modified nucleoside
  misc_feature (2)..(3): Phosphorothioate linkage
  modified_base (3)..(3): 2' O-methyl modified nucleoside
  modified_base (4)..(4): 2' fluoro-modified nucleoside
  modified_base (5)..(5): 2' O-methyl modified nucleoside
  modified_base (6)..(6): 2' fluoro-modified nucleoside
  modified_base (7)..(7): 2' O-methyl modified nucleoside
  modified_base (8)..(8): 2' fluoro-modified nucleoside
  modified_base (9)..(9): 2' O-methyl modified nucleoside
  modified_base (10)..(10): 2' fluoro-modified nucleoside
  modified_base (11)..(11): 2' O-methyl modified nucleoside
  modified_base (12)..(12): 2' O-methyl modified nucleoside
  modified_base (13)..(13): 2' O-methyl modified nucleoside
  modified_base (14)..(14): 2' fluoro-modified nucleoside
  modified_base (15)..(15): 2' O-methyl modified nucleoside
  modified_base (16)..(16): 2' fluoro-modified nucleoside
  modified_base (17)..(17): 2' O-methyl modified nucleoside
  modified_base (18)..(18): 2' fluoro-modified nucleoside
  modified_base (19)..(19): 2' O-methyl modified nucleoside
  misc_feature (19)..(20): Phosphorothioate linkage
  modified_base (20)..(20): 2' O-methyl modified nucleoside
  misc_feature (20)..(21): Phosphorothioate linkage
  modified_base (21)..(21): 2' O-methyl modified nucleoside
uuuuuucgucucuggaugauu

SEQ ID NO: 11256 - RNA, 21 nt, Artificial Sequence
  Description of Artificial Sequence: Synthetic oligonucleotide
  modified_base (1)..(1): 2' O-methyl modified nucleoside
  misc_feature (1)..(2): Phosphorothioate linkage
  modified_base (2)..(2): 2' fluoro-modified nucleoside
  misc_feature (2)..(3): Phosphorothioate linkage
  modified_base (3)..(3): 2' O-methyl modified nucleoside
  modified_base (4)..(4): 2' fluoro-modified nucleoside
  modified_base (5)..(5): 2' O-methyl modified nucleoside
  modified_base (6)..(6): 2' fluoro-modified nucleoside
  modified_base (7)..(7): 2' O-methyl modified nucleoside
  modified_base (8)..(8): 2' fluoro-modified nucleoside
  modified_base (9)..(9): 2' O-methyl modified nucleoside
  modified_base (10)..(10): 2' fluoro-modified nucleoside
  modified_base (11)..(11): 2' O-methyl modified nucleoside
  modified_base (12)..(12): 2' O-methyl modified nucleoside
  modified_base (13)..(13): 2' O-methyl modified nucleoside
  modified_base (14)..(14): 2' fluoro-modified nucleoside
  modified_base (15)..(15): 2' O-methyl modified nucleoside
  modified_base (16)..(16): 2' fluoro-modified nucleoside
  modified_base (17)..(17): 2' O-methyl modified nucleoside
  modified_base (18)..(18): 2' fluoro-modified nucleoside
  modified_base (19)..(19): 2' O-methyl modified nucleoside
  misc_feature (19)..(20): Phosphorothioate linkage
  modified_base (20)..(20): 2' O-methyl modified nucleoside
  misc_feature (20)..(21): Phosphorothioate linkage
  modified_base (21)..(21): 2' O-methyl modified nucleoside
uaaguccccacggaugcuguu

SEQ ID NO: 11257 - RNA, 21 nt, Artificial Sequence
  Description of Artificial Sequence: Synthetic oligonucleotide
  modified_base (1)..(1): 2' O-methyl modified nucleoside
  misc_feature (1)..(2): Phosphorothioate linkage
  modified_base (2)..(2): 2' fluoro-modified nucleoside
  misc_feature (2)..(3): Phosphorothioate linkage
  modified_base (3)..(3): 2' O-methyl modified nucleoside
  modified_base (4)..(4): 2' fluoro-modified nucleoside
  modified_base (5)..(5): 2' O-methyl modified nucleoside
  modified_base (6)..(6): 2' fluoro-modified nucleoside
  modified_base (7)..(7): 2' O-methyl modified nucleoside
  modified_base (8)..(8): 2' fluoro-modified nucleoside
  modified_base (9)..(9): 2' O-methyl modified nucleoside
  modified_base (10)..(10): 2' fluoro-modified nucleoside
  modified_base (11)..(11): 2' O-methyl modified nucleoside
  modified_base (12)..(12): 2' O-methyl modified nucleoside
  modified_base (13)..(13): 2' O-methyl modified nucleoside
  modified_base (14)..(14): 2' fluoro-modified nucleoside
  modified_base (15)..(15): 2' O-methyl modified nucleoside
  modified_base (16)..(16): 2' fluoro-modified nucleoside
  modified_base (17)..(17): 2' O-methyl modified nucleoside
  modified_base (18)..(18): 2' fluoro-modified nucleoside
  modified_base (19)..(19): 2' O-methyl modified nucleoside
  misc_feature (19)..(20): Phosphorothioate linkage
  modified_base (20)..(20): 2' O-methyl modified nucleoside
  misc_feature (20)..(21): Phosphorothioate linkage
  modified_base (21)..(21): 2' O-methyl modified nucleoside
uagagccgguggauguguuuu

SEQ ID NO: 11258 - RNA, 21 nt, Artificial Sequence
  Description of Artificial Sequence: Synthetic oligonucleotide
  modified_base (1)..(1): 2' O-methyl modified nucleoside
  misc_feature (1)..(2): Phosphorothioate linkage
  modified_base (2)..(2): 2' fluoro-modified nucleoside
  misc_feature (2)..(3): Phosphorothioate linkage
  modified_base (3)..(3): 2' O-methyl modified nucleoside
  modified_base (4)..(4): 2' fluoro-modified nucleoside
  modified_base (5)..(5): 2' O-methyl modified nucleoside
  modified_base (6)..(6): 2' fluoro-modified nucleoside
  modified_base (7)..(7): 2' O-methyl modified nucleoside
  modified_base (8)..(8): 2' fluoro-modified nucleoside
  modified_base (9)..(9): 2' O-methyl modified nucleoside
  modified_base (10)..(10): 2' fluoro-modified nucleoside
  modified_base (11)..(11): 2' O-methyl modified nucleoside
  modified_base (12)..(12): 2' O-methyl modified nucleoside
  modified_base (13)..(13): 2' O-methyl modified nucleoside
  modified_base (14)..(14): 2' fluoro-modified nucleoside
  modified_base (15)..(15): 2' O-methyl modified nucleoside
  modified_base (16)..(16): 2' fluoro-modified nucleoside
  modified_base (17)..(17): 2' O-methyl modified nucleoside
  modified_base (18)..(18): 2' fluoro-modified nucleoside
  modified_base (19)..(19): 2' O-methyl modified nucleoside
  misc_feature (19)..(20): Phosphorothioate linkage
  modified_base (20)..(20): 2' O-methyl modified nucleoside
  misc_feature (20)..(21): Phosphorothioate linkage
  modified_base (21)..(21): 2' O-methyl modified nucleoside
ucuggagagccgguggauguu

SEQ ID NO: 11259 - RNA, 21 nt, Artificial Sequence
  Description of Artificial Sequence: Synthetic oligonucleotide
  modified_base (1)..(1): 2' O-methyl modified nucleoside
  misc_feature (1)..(2): Phosphorothioate linkage
  modified_base (2)..(2): 2' fluoro-modified nucleoside
  misc_feature (2)..(3): Phosphorothioate linkage
  modified_base (3)..(3): 2' O-methyl modified nucleoside
  modified_base (4)..(4): 2' fluoro-modified nucleoside
  modified_base (5)..(5): 2' O-methyl modified nucleoside
  modified_base (6)..(6): 2' fluoro-modified nucleoside
  modified_base (7)..(7): 2' O-methyl modified nucleoside
  modified_base (8)..(8): 2' fluoro-modified nucleoside
  modified_base (9)..(9): 2' O-methyl modified nucleoside
  modified_base (10)..(10): 2' fluoro-modified nucleoside
  modified_base (11)..(11): 2' O-methyl modified nucleoside
  modified_base (12)..(12): 2' O-methyl modified nucleoside
  modified_base (13)..(13): 2' O-methyl modified nucleoside
  modified_base (14)..(14): 2' fluoro-modified nucleoside
  modified_base (15)..(15): 2' O-methyl modified nucleoside
  modified_base (16)..(16): 2' fluoro-modified nucleoside
  modified_base (17)..(17): 2' O-methyl modified nucleoside
  modified_base (18)..(18): 2' fluoro-modified nucleoside
  modified_base (19)..(19): 2' O-methyl modified nucleoside
  misc_feature (19)..(20): Phosphorothioate linkage
  modified_base (20)..(20): 2' O-methyl modified nucleoside
  misc_feature (20)..(21): Phosphorothioate linkage
  modified_base (21)..(21): 2' O-methyl modified nucleoside
uuacacgcagccggguugguu

SEQ ID NO: 11260 - RNA, 21 nt, Artificial Sequence
  Description of Artificial Sequence: Synthetic oligonucleotide
  modified_base (1)..(1): 2' O-methyl modified nucleoside
  misc_feature (1)..(2): Phosphorothioate linkage
  modified_base (2)..(2): 2' fluoro-modified nucleoside
  misc_feature (2)..(3): Phosphorothioate linkage
  modified_base (3)..(3): 2' O-methyl modified nucleoside
  modified_base (4)..(4): 2' fluoro-modified nucleoside
  modified_base (5)..(5): 2' O-methyl modified nucleoside
  modified_base (6)..(6): 2' fluoro-modified nucleoside
  modified_base (7)..(7): 2' O-methyl modified nucleoside
  modified_base (8)..(8): 2' fluoro-modified nucleoside
  modified_base (9)..(9): 2' O-methyl modified nucleoside
  modified_base (10)..(10): 2' fluoro-modified nucleoside
  modified_base (11)..(11): 2' O-methyl modified nucleoside
  modified_base (12)..(12): 2' O-methyl modified nucleoside
  modified_base (13)..(13): 2' O-methyl modified nucleoside
  modified_base (14)..(14): 2' fluoro-modified nucleoside
  modified_base (15)..(15): 2' O-methyl modified nucleoside
  modified_base (16)..(16): 2' fluoro-modified nucleoside
  modified_base (17)..(17): 2' O-methyl modified nucleoside
  modified_base (18)..(18): 2' fluoro-modified nucleoside
  modified_base (19)..(19): 2' O-methyl modified nucleoside
  misc_feature (19)..(20): Phosphorothioate linkage
  modified_base (20)..(20): 2' O-methyl modified nucleoside
  misc_feature (20)..(21): Phosphorothioate linkage
  modified_base (21)..(21): 2' O-methyl modified nucleoside
ucuacacgcagccggguuguu

SEQ ID NO: 11261 - RNA, 21 nt, Artificial Sequence
  Description of Artificial Sequence: Synthetic oligonucleotide
  modified_base (1)..(1): 2' O-methyl modified nucleoside
  misc_feature (1)..(2): Phosphorothioate linkage
  modified_base (2)..(2): 2' fluoro-modified nucleoside
  misc_feature (2)..(3): Phosphorothioate linkage
  modified_base (3)..(3): 2' O-methyl modified nucleoside
  modified_base (4)..(4): 2' fluoro-modified nucleoside
  modified_base (5)..(5): 2' O-methyl modified nucleoside
  modified_base (6)..(6): 2' fluoro-modified nucleoside
  modified_base (7)..(7): 2' O-methyl modified nucleoside
  modified_base (8)..(8): 2' fluoro-modified nucleoside
  modified_base (9)..(9): 2' O-methyl modified nucleoside
  modified_base (10)..(10): 2' fluoro-modified nucleoside
  modified_base (11)..(11): 2' O-methyl modified nucleoside
  modified_base (12)..(12): 2' O-methyl modified nucleoside
  modified_base (13)..(13): 2' O-methyl modified nucleoside
  modified_base (14)..(14): 2' fluoro-modified nucleoside
  modified_base (15)..(15): 2' O-methyl modified nucleoside
  modified_base (16)..(16): 2' fluoro-modified nucleoside
  modified_base (17)..(17): 2' O-methyl modified nucleoside
  modified_base (18)..(18): 2' fluoro-modified nucleoside
  modified_base (19)..(19): 2' O-methyl modified nucleoside
  misc_feature (19)..(20): Phosphorothioate linkage
  modified_base (20)..(20): 2' O-methyl modified nucleoside
  misc_feature (20)..(21): Phosphorothioate linkage
  modified_base (21)..(21): 2' O-methyl modified nucleoside
uucuacacgcagccggguuuu

SEQ ID NO: 11262 - RNA, 21 nt, Artificial Sequence
  Description of Artificial Sequence: Synthetic oligonucleotide
  modified_base (1)..(1): 2' O-methyl modified nucleoside
  misc_feature (1)..(2): Phosphorothioate linkage
  modified_base (2)..(2): 2' fluoro-modified nucleoside
  misc_feature (2)..(3): Phosphorothioate linkage
  modified_base (3)..(3): 2' O-methyl modified nucleoside
  modified_base (4)..(4): 2' fluoro-modified nucleoside
  modified_base (5)..(5): 2' O-methyl modified nucleoside
  modified_base (6)..(6): 2' fluoro-modified nucleoside
  modified_base (7)..(7): 2' O-methyl modified nucleoside
  modified_base (8)..(8): 2' fluoro-modified nucleoside
  modified_base (9)..(9): 2' O-methyl modified nucleoside
  modified_base (10)..(10): 2' fluoro-modified nucleoside
  modified_base (11)..(11): 2' O-methyl modified nucleoside
  modified_base (12)..(12): 2' O-methyl modified nucleoside
  modified_base (13)..(13): 2' O-methyl modified nucleoside
  modified_base (14)..(14): 2' fluoro-modified nucleoside
  modified_base (15)..(15): 2' O-methyl modified nucleoside
  modified_base (16)..(16): 2' fluoro-modified nucleoside
  modified_base (17)..(17): 2' O-methyl modified nucleoside
  modified_base (18)..(18): 2' fluoro-modified nucleoside
  modified_base (19)..(19): 2' O-methyl modified nucleoside
  misc_feature (19)..(20): Phosphorothioate linkage
  modified_base (20)..(20): 2' O-methyl modified nucleoside
  misc_feature (20)..(21): Phosphorothioate linkage
  modified_base (21)..(21): 2' O-methyl modified nucleoside
uccaucucuacacgcagccuu

SEQ ID NO: 11263 - RNA, 21 nt, Artificial Sequence
  Description of Artificial Sequence: Synthetic oligonucleotide
  modified_base (1)..(1): 2' O-methyl modified nucleoside
  misc_feature (1)..(2): Phosphorothioate linkage
  modified_base (2)..(2): 2' fluoro-modified nucleoside
  misc_feature (2)..(3): Phosphorothioate linkage
  modified_base (3)..(3): 2' O-methyl modified nucleoside
  modified_base (4)..(4): 2' fluoro-modified nucleoside
  modified_base (5)..(5): 2' O-methyl modified nucleoside
  modified_base (6)..(6): 2' fluoro-modified nucleoside
  modified_base (7)..(7): 2' O-methyl modified nucleoside
  modified_base (8)..(8): 2' fluoro-modified nucleoside
  modified_base (9)..(9): 2' O-methyl modified nucleoside
  modified_base (10)..(10): 2' fluoro-modified nucleoside
  modified_base (11)..(11): 2' O-methyl modified nucleoside
  modified_base (12)..(12): 2' O-methyl modified nucleoside
  modified_base (13)..(13): 2' O-methyl modified nucleoside
  modified_base (14)..(14): 2' fluoro-modified nucleoside
  modified_base (15)..(15): 2' O-methyl modified nucleoside
  modified_base (16)..(16): 2' fluoro-modified nucleoside
  modified_base (17)..(17): 2' O-methyl modified nucleoside
  modified_base (18)..(18): 2' fluoro-modified nucleoside
  modified_base (19)..(19): 2' O-methyl modified nucleoside
  misc_feature (19)..(20): Phosphorothioate linkage
  modified_base (20)..(20): 2' O-methyl modified nucleoside
  misc_feature (20)..(21): Phosphorothioate linkage
  modified_base (21)..(21): 2' O-methyl modified nucleoside
uuccaucucuacacgcagcuu

SEQ ID NO: 11264 - RNA, 21 nt, Artificial Sequence
  Description of Artificial Sequence: Synthetic oligonucleotide
  modified_base (1)..(1): 2' O-methyl modified nucleoside
  misc_feature (1)..(2): Phosphorothioate linkage
  modified_base (2)..(2): 2' fluoro-modified nucleoside
  misc_feature (2)..(3): Phosphorothioate linkage
  modified_base (3)..(3): 2' O-methyl modified nucleoside
  modified_base (4)..(4): 2' fluoro-modified nucleoside
  modified_base (5)..(5): 2' O-methyl modified nucleoside
  modified_base (6)..(6): 2' fluoro-modified nucleoside
  modified_base (7)..(7): 2' O-methyl modified nucleoside
  modified_base (8)..(8): 2' fluoro-modified nucleoside
  modified_base (9)..(9): 2' O-methyl modified nucleoside
  modified_base (10)..(10): 2' fluoro-modified nucleoside
  modified_base (11)..(11): 2' O-methyl modified nucleoside
  modified_base (12)..(12): 2' O-methyl modified nucleoside
  modified_base (13)..(13): 2' O-methyl modified nucleoside
  modified_base (14)..(14): 2' fluoro-modified nucleoside
  modified_base (15)..(15): 2' O-methyl modified nucleoside
  modified_base (16)..(16): 2' fluoro-modified nucleoside
  modified_base (17)..(17): 2' O-methyl modified nucleoside
  modified_base (18)..(18): 2' fluoro-modified nucleoside
  modified_base (19)..(19): 2' O-methyl modified nucleoside
  misc_feature (19)..(20): Phosphorothioate linkage
  modified_base (20)..(20): 2' O-methyl modified nucleoside
  misc_feature (20)..(21): Phosphorothioate linkage
  modified_base (21)..(21): 2' O-methyl modified nucleoside
uccuccaucucuacacgcauu

SEQ ID NO: 11265 - RNA, 21 nt, Artificial Sequence
  Description of Artificial Sequence: Synthetic oligonucleotide
  modified_base (1)..(1): 2' O-methyl modified nucleoside
  misc_feature (1)..(2): Phosphorothioate linkage
  modified_base (2)..(2): 2' fluoro-modified nucleoside
  misc_feature (2)..(3): Phosphorothioate linkage
  modified_base (3)..(3): 2' O-methyl modified nucleoside
  modified_base (4)..(4): 2' fluoro-modified nucleoside
  modified_base (5)..(5): 2' O-methyl modified nucleoside
  modified_base (6)..(6): 2' fluoro-modified nucleoside
  modified_base (7)..(7): 2' O-methyl modified nucleoside
  modified_base (8)..(8): 2' fluoro-modified nucleoside
  modified_base (9)..(9): 2' O-methyl modified nucleoside
  modified_base (10)..(10): 2' fluoro-modified nucleoside
  modified_base (11)..(11): 2' O-methyl modified nucleoside
  modified_base (12)..(12): 2' O-methyl modified nucleoside
  modified_base (13)..(13): 2' O-methyl modified nucleoside
  modified_base (14)..(14): 2' fluoro-modified nucleoside
  modified_base (15)..(15): 2' O-methyl modified nucleoside
  modified_base (16)..(16): 2' fluoro-modified nucleoside
  modified_base (17)..(17): 2' O-methyl modified nucleoside
  modified_base (18)..(18): 2' fluoro-modified nucleoside
  modified_base (19)..(19): 2' O-methyl modified nucleoside
  misc_feature (19)..(20): Phosphorothioate linkage
  modified_base (20)..(20): 2' O-methyl modified nucleoside
  misc_feature (20)..(21): Phosphorothioate linkage
  modified_base (21)..(21): 2' O-methyl modified nucleoside
ucguagcgcagguugcccuuu

SEQ ID NO: 11266 - RNA, 21 nt, Artificial Sequence
  Description of Artificial Sequence: Synthetic oligonucleotide
  modified_base (1)..(1): 2' O-methyl modified nucleoside
  misc_feature (1)..(2): Phosphorothioate linkage
  modified_base (2)..(2): 2' fluoro-modified nucleoside
  misc_feature (2)..(3): Phosphorothioate linkage
  modified_base (3)..(3): 2' O-methyl modified nucleoside
  modified_base (4)..(4): 2' fluoro-modified nucleoside
  modified_base (5)..(5): 2' O-methyl modified nucleoside
  modified_base (6)..(6): 2' fluoro-modified nucleoside
  modified_base (7)..(7): 2' O-methyl modified nucleoside
  modified_base (8)..(8): 2' fluoro-modified nucleoside
  modified_base (9)..(9): 2' O-methyl modified nucleoside
  modified_base (10)..(10): 2' fluoro-modified nucleoside
  modified_base (11)..(11): 2' O-methyl modified nucleoside
  modified_base (12)..(12): 2' O-methyl modified nucleoside
  modified_base (13)..(13): 2' O-methyl modified nucleoside
  modified_base (14)..(14): 2' fluoro-modified nucleoside
  modified_base (15)..(15): 2' O-methyl modified nucleoside
  modified_base (16)..(16): 2' fluoro-modified nucleoside
  modified_base (17)..(17): 2' O-methyl modified nucleoside
  modified_base (18)..(18): 2' fluoro-modified nucleoside
  modified_base (19)..(19): 2' O-methyl modified nucleoside
  misc_feature (19)..(20): Phosphorothioate linkage
  modified_base (20)..(20): 2' O-methyl modified nucleoside
  misc_feature (20)..(21): Phosphorothioate linkage
  modified_base (21)..(21): 2' O-methyl modified nucleoside
ugcguagcgcagguugcccuu

SEQ ID NO: 11267 - RNA, 21 nt, Artificial Sequence
  Description of Artificial Sequence: Synthetic oligonucleotide
  modified_base (1)..(1): 2' O-methyl modified nucleoside
  misc_feature (1)..(2): Phosphorothioate linkage
  modified_base (2)..(2): 2' fluoro-modified nucleoside
  misc_feature (2)..(3): Phosphorothioate linkage
  modified_base (3)..(3): 2' O-methyl modified nucleoside
  modified_base (4)..(4): 2' fluoro-modified nucleoside
  modified_base (5)..(5): 2' O-methyl modified nucleoside
  modified_base (6)..(6): 2' fluoro-modified nucleoside
  modified_base (7)..(7): 2' O-methyl modified nucleoside
  modified_base (8)..(8): 2' fluoro-modified nucleoside
  modified_base (9)..(9): 2' O-methyl modified nucleoside
  modified_base (10)..(10): 2' fluoro-modified nucleoside
  modified_base (11)..(11): 2' O-methyl modified nucleoside
  modified_base (12)..(12): 2' O-methyl modified nucleoside
  modified_base (13)..(13): 2' O-methyl modified nucleoside
  modified_base (14)..(14): 2' fluoro-modified nucleoside
  modified_base (15)..(15): 2' O-methyl modified nucleoside
  modified_base (16)..(16): 2' fluoro-modified nucleoside
  modified_base (17)..(17): 2' O-methyl modified nucleoside
  modified_base (18)..(18): 2' fluoro-modified nucleoside
  modified_base (19)..(19): 2' O-methyl modified nucleoside
  misc_feature (19)..(20): Phosphorothioate linkage
  modified_base (20)..(20): 2' O-methyl modified nucleoside
  misc_feature (20)..(21): Phosphorothioate linkage
  modified_base (21)..(21): 2' O-methyl modified nucleoside
uagcguagcgcagguugccuu

SEQ ID NO: 11268 - RNA, 21 nt, Artificial Sequence
  Description of Artificial Sequence: Synthetic oligonucleotide
  modified_base (1)..(1): 2' O-methyl modified nucleoside
  misc_feature (1)..(2): Phosphorothioate linkage
  modified_base (2)..(2): 2' fluoro-modified nucleoside
  misc_feature (2)..(3): Phosphorothioate linkage
  modified_base (3)..(3): 2' O-methyl modified nucleoside
  modified_base (4)..(4): 2' fluoro-modified nucleoside
  modified_base (5)..(5): 2' O-methyl modified nucleoside
  modified_base (6)..(6): 2' fluoro-modified nucleoside
  modified_base (7)..(7): 2' O-methyl modified nucleoside
  modified_base (8)..(8): 2' fluoro-modified nucleoside
  modified_base (9)..(9): 2' O-methyl modified nucleoside
  modified_base (10)..(10): 2' fluoro-modified nucleoside
  modified_base (11)..(11): 2' O-methyl modified nucleoside
  modified_base (12)..(12): 2' O-methyl modified nucleoside
  modified_base (13)..(13): 2' O-methyl modified nucleoside
  modified_base (14)..(14): 2' fluoro-modified nucleoside
  modified_base (15)..(15): 2' O-methyl modified nucleoside
  modified_base (16)..(16): 2' fluoro-modified nucleoside
  modified_base (17)..(17): 2' O-methyl modified nucleoside
  modified_base (18)..(18): 2' fluoro-modified nucleoside
  modified_base (19)..(19): 2' O-methyl modified nucleoside
  misc_feature (19)..(20): Phosphorothioate linkage
  modified_base (20)..(20): 2' O-methyl modified nucleoside
  misc_feature (20)..(21): Phosphorothioate linkage
  modified_base (21)..(21): 2' O-methyl modified nucleoside
ucagcguagcgcagguugcuu

SEQ ID NO: 11269 - RNA, 21 nt, Artificial Sequence
  Description of Artificial Sequence: Synthetic oligonucleotide
  modified_base (1)..(1): 2' O-methyl modified nucleoside
  misc_feature (1)..(2): Phosphorothioate linkage
  modified_base (2)..(2): 2' fluoro-modified nucleoside
  misc_feature (2)..(3): Phosphorothioate linkage
  modified_base (3)..(3): 2' O-methyl modified nucleoside
  modified_base (4)..(4): 2' fluoro-modified nucleoside
  modified_base (5)..(5): 2' O-methyl modified nucleoside
  modified_base (6)..(6): 2' fluoro-modified nucleoside
  modified_base (7)..(7): 2' O-methyl modified nucleoside
  modified_base (8)..(8): 2' fluoro-modified nucleoside
  modified_base (9)..(9): 2' O-methyl modified nucleoside
  modified_base (10)..(10): 2' fluoro-modified nucleoside
  modified_base (11)..(11): 2' O-methyl modified nucleoside
  modified_base (12)..(12): 2' O-methyl modified nucleoside
  modified_base (13)..(13): 2' O-methyl modified nucleoside
  modified_base (14)..(14): 2' fluoro-modified nucleoside
  modified_base (15)..(15): 2' O-methyl modified nucleoside
  modified_base (16)..(16): 2' fluoro-modified nucleoside
  modified_base (17)..(17): 2' O-methyl modified nucleoside
  modified_base (18)..(18): 2' fluoro-modified nucleoside
  modified_base (19)..(19): 2' O-methyl modified nucleoside
  misc_feature (19)..(20): Phosphorothioate linkage
  modified_base (20)..(20): 2' O-methyl modified nucleoside
  misc_feature (20)..(21): Phosphorothioate linkage
  modified_base (21)..(21): 2' O-methyl modified nucleoside
ugcuauacucagcguagcguu

SEQ ID NO: 11270 - RNA, 21 nt, Artificial Sequence
  Description of Artificial Sequence: Synthetic oligonucleotide
  modified_base (1)..(1): 2' O-methyl modified nucleoside
  misc_feature (1)..(2): Phosphorothioate linkage
  modified_base (2)..(2): 2' fluoro-modified nucleoside
  misc_feature (2)..(3): Phosphorothioate linkage
  modified_base (3)..(3): 2' O-methyl modified nucleoside
  modified_base (4)..(4): 2' fluoro-modified nucleoside
  modified_base (5)..(5): 2' O-methyl modified nucleoside
  modified_base (6)..(6): 2' fluoro-modified nucleoside
  modified_base (7)..(7): 2' O-methyl modified nucleoside
  modified_base (8)..(8): 2' fluoro-modified nucleoside
  modified_base (9)..(9): 2' O-methyl modified nucleoside
  modified_base (10)..(10): 2' fluoro-modified nucleoside
  modified_base (11)..(11): 2' O-methyl modified nucleoside
  modified_base (12)..(12): 2' O-methyl modified nucleoside
  modified_base (13)..(13): 2' O-methyl modified nucleoside
  modified_base (14)..(14): 2' fluoro-modified nucleoside
  modified_base (15)..(15): 2' O-methyl modified nucleoside
  modified_base (16)..(16): 2' fluoro-modified nucleoside
  modified_base (17)..(17): 2' O-methyl modified nucleoside
  modified_base (18)..(18): 2' fluoro-modified nucleoside
  modified_base (19)..(19): 2' O-methyl modified nucleoside
  misc_feature (19)..(20): Phosphorothioate linkage
  modified_base (20)..(20): 2' O-methyl modified nucleoside
  misc_feature (20)..(21): Phosphorothioate linkage
  modified_base (21)..(21): 2' O-methyl modified nucleoside
uggcuauacucagcguagcuu

SEQ ID NO: 11271 - RNA, 21 nt, Artificial Sequence
  Description of Artificial Sequence: Synthetic oligonucleotide
  modified_base (1)..(1): 2' O-methyl modified nucleoside
  misc_feature (1)..(2): Phosphorothioate linkage
  modified_base (2)..(2): 2' fluoro-modified nucleoside
  misc_feature (2)..(3): Phosphorothioate linkage
  modified_base (3)..(3): 2' O-methyl modified nucleoside
  modified_base (4)..(4): 2' fluoro-modified nucleoside
  modified_base (5)..(5): 2' O-methyl modified nucleoside
  modified_base (6)..(6): 2' fluoro-modified nucleoside
  modified_base (7)..(7): 2' O-methyl modified nucleoside
  modified_base (8)..(8): 2' fluoro-modified nucleoside
  modified_base (9)..(9): 2' O-methyl modified nucleoside
  modified_base (10)..(10): 2' fluoro-modified nucleoside
  modified_base (11)..(11): 2' O-methyl modified nucleoside
  modified_base (12)..(12): 2' O-methyl modified nucleoside
  modified_base (13)..(13): 2' O-methyl modified nucleoside
  modified_base (14)..(14): 2' fluoro-modified nucleoside
  modified_base (15)..(15): 2' O-methyl modified nucleoside
  modified_base (16)..(16): 2' fluoro-modified nucleoside
  modified_base (17)..(17): 2' O-methyl modified nucleoside
  modified_base (18)..(18): 2' fluoro-modified nucleoside
  modified_base (19)..(19): 2' O-methyl modified nucleoside
  misc_feature (19)..(20): Phosphorothioate linkage
  modified_base (20)..(20): 2' O-methyl modified nucleoside
  misc_feature (20)..(21): Phosphorothioate linkage
  modified_base (21)..(21): 2' O-methyl modified nucleoside
uuggcuauacucagcguaguu

SEQ ID NO: 11272 - RNA, 21 nt, Artificial Sequence
  Description of Artificial Sequence: Synthetic oligonucleotide
  modified_base (1)..(1): 2' O-methyl modified nucleoside
  misc_feature (1)..(2): Phosphorothioate linkage
  modified_base (2)..(2): 2' fluoro-modified nucleoside
  misc_feature (2)..(3): Phosphorothioate linkage
  modified_base (3)..(3): 2' O-methyl modified nucleoside
  modified_base (4)..(4): 2' fluoro-modified nucleoside
  modified_base (5)..(5): 2' O-methyl modified nucleoside
  modified_base (6)..(6): 2' fluoro-modified nucleoside
  modified_base (7)..(7): 2' O-methyl modified nucleoside
  modified_base (8)..(8): 2' fluoro-modified nucleoside
  modified_base (9)..(9): 2' O-methyl modified nucleoside
  modified_base (10)..(10): 2' fluoro-modified nucleoside
  modified_base (11)..(11): 2' O-methyl modified nucleoside
  modified_base (12)..(12): 2' O-methyl modified nucleoside
  modified_base (13)..(13): 2' O-methyl modified nucleoside
  modified_base (14)..(14): 2' fluoro-modified nucleoside
  modified_base (15)..(15): 2' O-methyl modified nucleoside
  modified_base (16)..(16): 2' fluoro-modified nucleoside
  modified_base (17)..(17): 2' O-methyl modified nucleoside
  modified_base (18)..(18): 2' fluoro-modified nucleoside
  modified_base (19)..(19): 2' O-methyl modified nucleoside
  misc_feature (19)..(20): Phosphorothioate linkage
  modified_base (20)..(20): 2' O-methyl modified nucleoside
  misc_feature (20)..(21): Phosphorothioate linkage
  modified_base (21)..(21): 2' O-methyl modified nucleoside
uguggcuauacucagcguauu

SEQ ID NO: 11273 - RNA, 21 nt, Artificial Sequence
  Description of Artificial Sequence: Synthetic oligonucleotide
  modified_base (1)..(1): 2' O-methyl modified nucleoside
  misc_feature (1)..(2): Phosphorothioate linkage
  modified_base (2)..(2): 2' fluoro-modified nucleoside
  misc_feature (2)..(3): Phosphorothioate linkage
  modified_base (3)..(3): 2' O-methyl modified nucleoside
  modified_base (4)..(4): 2' fluoro-modified nucleoside
  modified_base (5)..(5): 2' O-methyl modified nucleoside
  modified_base (6)..(6): 2' fluoro-modified nucleoside
  modified_base (7)..(7): 2' O-methyl modified nucleoside
  modified_base (8)..(8): 2' fluoro-modified nucleoside
  modified_base (9)..(9): 2' O-methyl modified nucleoside
  modified_base (10)..(10): 2' fluoro-modified nucleoside
  modified_base (11)..(11): 2' O-methyl modified nucleoside
  modified_base (12)..(12): 2' O-methyl modified nucleoside
  modified_base (13)..(13): 2' O-methyl modified nucleoside
  modified_base (14)..(14): 2' fluoro-modified nucleoside
  modified_base (15)..(15): 2' O-methyl modified nucleoside
  modified_base (16)..(16): 2' fluoro-modified nucleoside
  modified_base (17)..(17): 2' O-methyl modified nucleoside
  modified_base (18)..(18): 2' fluoro-modified nucleoside
  modified_base (19)..(19): 2' O-methyl modified nucleoside
  misc_feature (19)..(20): Phosphorothioate linkage
  modified_base (20)..(20): 2' O-methyl modified nucleoside
  misc_feature (20)..(21): Phosphorothioate linkage
  modified_base (21)..(21): 2' O-methyl modified nucleoside
ugcgauagcuguugaguucuu

SEQ ID NO: 11274 - RNA, 21 nt, Artificial Sequence
  Description of Artificial Sequence: Synthetic oligonucleotide
  modified_base (1)..(1): 2' O-methyl modified nucleoside
  misc_feature (1)..(2): Phosphorothioate linkage
  modified_base (2)..(2): 2' fluoro-modified nucleoside
  misc_feature (2)..(3): Phosphorothioate linkage
  modified_base (3)..(3): 2' O-methyl modified nucleoside
  modified_base (4)..(4): 2' fluoro-modified nucleoside
  modified_base (5)..(5): 2' O-methyl modified nucleoside
  modified_base (6)..(6): 2' fluoro-modified nucleoside
  modified_base (7)..(7): 2' O-methyl modified nucleoside
  modified_base (8)..(8): 2' fluoro-modified nucleoside
  modified_base (9)..(9): 2' O-methyl modified nucleoside
  modified_base (10)..(10): 2' fluoro-modified nucleoside
  modified_base (11)..(11): 2' O-methyl modified nucleoside
  modified_base (12)..(12): 2' O-methyl modified nucleoside
  modified_base (13)..(13): 2' O-methyl modified nucleoside
  modified_base (14)..(14): 2' fluoro-modified nucleoside
  modified_base (15)..(15): 2' O-methyl modified nucleoside
  modified_base (16)..(16): 2' fluoro-modified nucleoside
  modified_base (17)..(17): 2' O-methyl modified nucleoside
  modified_base (18)..(18): 2' fluoro-modified nucleoside
  modified_base (19)..(19): 2' O-methyl modified nucleoside
  misc_feature (19)..(20): Phosphorothioate linkage
  modified_base (20)..(20): 2' O-methyl modified nucleoside
  misc_feature (20)..(21): Phosphorothioate linkage
  modified_base (21)..(21): 2' O-methyl modified nucleoside
ugaagaggcgauagcuguuuu

SEQ ID NO: 11275 - RNA, 21 nt, Artificial Sequence
  Description of Artificial Sequence: Synthetic oligonucleotide
  modified_base (1)..(1): 2' O-methyl modified nucleoside
  misc_feature (1)..(2): Phosphorothioate linkage
  modified_base (2)..(2): 2' fluoro-modified nucleoside
  misc_feature (2)..(3): Phosphorothioate linkage
  modified_base (3)..(3): 2' O-methyl modified nucleoside
  modified_base (4)..(4): 2' fluoro-modified nucleoside
  modified_base (5)..(5): 2' O-methyl modified nucleoside
  modified_base (6)..(6): 2' fluoro-modified nucleoside
  modified_base (7)..(7): 2' O-methyl modified nucleoside
  modified_base (8)..(8): 2' fluoro-modified nucleoside
  modified_base (9)..(9): 2' O-methyl modified nucleoside
  modified_base (10)..(10): 2' fluoro-modified nucleoside
  modified_base (11)..(11): 2' O-methyl modified nucleoside
  modified_base (12)..(12): 2' O-methyl modified nucleoside
  modified_base (13)..(13): 2' O-methyl modified nucleoside
  modified_base (14)..(14): 2' fluoro-modified nucleoside
  modified_base (15)..(15): 2' O-methyl modified nucleoside
  modified_base (16)..(16): 2' fluoro-modified nucleoside
  modified_base (17)..(17): 2' O-methyl modified nucleoside
  modified_base (18)..(18): 2' fluoro-modified nucleoside
  modified_base (19)..(19): 2' O-methyl modified nucleoside
  misc_feature (19)..(20): Phosphorothioate linkage
  modified_base (20)..(20): 2' O-methyl modified nucleoside
  misc_feature (20)..(21): Phosphorothioate linkage
  modified_base (21)..(21): 2' O-methyl modified nucleoside
ugccaguguaguuccccaguu

SEQ ID NO: 11276 - RNA, 21 nt, Artificial Sequence
  Description of Artificial Sequence: Synthetic oligonucleotide
  modified_base (1)..(1): 2' O-methyl modified nucleoside
  misc_feature (1)..(2): Phosphorothioate linkage
  modified_base (2)..(2): 2' fluoro-modified nucleoside
  misc_feature (2)..(3): Phosphorothioate linkage
  modified_base (3)..(3): 2' O-methyl modified nucleoside
  modified_base (4)..(4): 2' fluoro-modified nucleoside
  modified_base (5)..(5): 2' O-methyl modified nucleoside
  modified_base (6)..(6): 2' fluoro-modified nucleoside
  modified_base (7)..(7): 2' O-methyl modified nucleoside
  modified_base (8)..(8): 2' fluoro-modified nucleoside
  modified_base (9)..(9): 2' O-methyl modified nucleoside
  modified_base (10)..(10): 2' fluoro-modified nucleoside
  modified_base (11)..(11): 2' O-methyl modified nucleoside
  modified_base (12)..(12): 2' O-methyl modified nucleoside
  modified_base (13)..(13): 2' O-methyl modified nucleoside
  modified_base (14)..(14): 2' fluoro-modified nucleoside
  modified_base (15)..(15): 2' O-methyl modified nucleoside
  modified_base (16)..(16): 2' fluoro-modified nucleoside
  modified_base (17)..(17): 2' O-methyl modified nucleoside
  modified_base (18)..(18): 2' fluoro-modified nucleoside
  modified_base (19)..(19): 2' O-methyl modified nucleoside
  misc_feature (19)..(20): Phosphorothioate linkage
  modified_base (20)..(20): 2' O-methyl modified nucleoside
  misc_feature (20)..(21): Phosphorothioate linkage
  modified_base (21)..(21): 2' O-methyl modified nucleoside
uauugccaguguaguucccuu

SEQ ID NO: 11277 - RNA, 21 nt, Artificial Sequence
  Description of Artificial Sequence: Synthetic oligonucleotide
  modified_base (1)..(1): 2' O-methyl modified nucleoside
  misc_feature (1)..(2): Phosphorothioate linkage
  modified_base (2)..(2): 2' fluoro-modified nucleoside
  misc_feature (2)..(3): Phosphorothioate linkage
  modified_base (3)..(3): 2' O-methyl modified nucleoside
  modified_base (4)..(4): 2' fluoro-modified nucleoside
  modified_base (5)..(5): 2' O-methyl modified nucleoside
  modified_base (6)..(6): 2' fluoro-modified nucleoside
  modified_base (7)..(7): 2' O-methyl modified nucleoside
  modified_base (8)..(8): 2' fluoro-modified nucleoside
  modified_base (9)..(9): 2' O-methyl modified nucleoside
  modified_base (10)..(10): 2' fluoro-modified nucleoside
  modified_base (11)..(11): 2' O-methyl modified nucleoside
  modified_base (12)..(12): 2' O-methyl modified nucleoside
  modified_base (13)..(13): 2' O-methyl modified nucleoside
  modified_base (14)..(14): 2' fluoro-modified nucleoside
  modified_base (15)..(15): 2' O-methyl modified nucleoside
  modified_base (16)..(16): 2' fluoro-modified nucleoside
  modified_base (17)..(17): 2' O-methyl modified nucleoside
  modified_base (18)..(18): 2' fluoro-modified nucleoside
  modified_base (19)..(19): 2' O-methyl modified nucleoside
  misc_feature (19)..(20): Phosphorothioate linkage
  modified_base (20)..(20): 2' O-methyl modified nucleoside
  misc_feature (20)..(21): Phosphorothioate linkage
  modified_base (21)..(21): 2' O-methyl modified nucleoside
ucacauugccaguguaguuuu

SEQ ID NO: 11278 - RNA, 21 nt, Artificial Sequence
  Description of Artificial Sequence: Synthetic oligonucleotide
  modified_base (1)..(1): 2' O-methyl modified nucleoside
  misc_feature (1)..(2): Phosphorothioate linkage
  modified_base (2)..(2): 2' fluoro-modified nucleoside
  misc_feature (2)..(3): Phosphorothioate linkage
  modified_base (3)..(3): 2' O-methyl modified nucleoside
  modified_base (4)..(4): 2' fluoro-modified nucleoside
  modified_base (5)..(5): 2' O-methyl modified nucleoside
  modified_base (6)..(6): 2' fluoro-modified nucleoside
  modified_base (7)..(7): 2' O-methyl modified nucleoside
  modified_base (8)..(8): 2' fluoro-modified nucleoside
  modified_base (9)..(9): 2' O-methyl modified nucleoside
  modified_base (10)..(10): 2' fluoro-modified nucleoside
  modified_base (11)..(11): 2' O-methyl modified nucleoside
  modified_base (12)..(12): 2' O-methyl modified nucleoside
  modified_base (13)..(13): 2' O-methyl modified nucleoside
  modified_base (14)..(14): 2' fluoro-modified nucleoside
  modified_base (15)..(15): 2' O-methyl modified nucleoside
  modified_base (16)..(16): 2' fluoro-modified nucleoside
  modified_base (17)..(17): 2' O-methyl modified nucleoside
  modified_base (18)..(18): 2' fluoro-modified nucleoside
  modified_base (19)..(19): 2' O-methyl modified nucleoside
  misc_feature (19)..(20): Phosphorothioate linkage
  modified_base (20)..(20): 2' O-methyl modified nucleoside
  misc_feature (20)..(21): Phosphorothioate linkage
  modified_base (21)..(21): 2' O-methyl modified nucleoside
ucccacauugccaguguaguu

SEQ ID NO: 11279 - RNA, 21 nt, Artificial Sequence
  Description of Artificial Sequence: Synthetic oligonucleotide
  modified_base (1)..(1): 2' O-methyl modified nucleoside
  misc_feature (1)..(2): Phosphorothioate linkage
  modified_base (2)..(2): 2' fluoro-modified nucleoside
  misc_feature (2)..(3): Phosphorothioate linkage
  modified_base (3)..(3): 2' O-methyl modified nucleoside
  modified_base (4)..(4): 2' fluoro-modified nucleoside
  modified_base (5)..(5): 2' O-methyl modified nucleoside
  modified_base (6)..(6): 2' fluoro-modified nucleoside
  modified_base (7)..(7): 2' O-methyl modified nucleoside
  modified_base (8)..(8): 2' fluoro-modified nucleoside
  modified_base (9)..(9): 2' O-methyl modified nucleoside
  modified_base (10)..(10): 2' fluoro-modified nucleoside
  modified_base (11)..(11): 2' O-methyl modified nucleoside
  modified_base (12)..(12): 2' O-methyl modified nucleoside
  modified_base (13)..(13): 2' O-methyl modified nucleoside
  modified_base (14)..(14): 2' fluoro-modified nucleoside
  modified_base (15)..(15): 2' O-methyl modified nucleoside
  modified_base (16)..(16): 2' fluoro-modified nucleoside
  modified_base (17)..(17): 2' O-methyl modified nucleoside
  modified_base (18)..(18): 2' fluoro-modified nucleoside
  modified_base (19)..(19): 2' O-methyl modified nucleoside
  misc_feature (19)..(20): Phosphorothioate linkage
  modified_base (20)..(20): 2' O-methyl modified nucleoside
  misc_feature (20)..(21): Phosphorothioate linkage
  modified_base (21)..(21): 2' O-methyl modified nucleoside
ucguuccccacauugccaguu

SEQ ID NO: 11280 - RNA, 21 nt, Artificial Sequence
  Description of Artificial Sequence: Synthetic oligonucleotide
  modified_base (1)..(1): 2' O-methyl modified nucleoside
  misc_feature (1)..(2): Phosphorothioate linkage
  modified_base (2)..(2): 2' fluoro-modified nucleoside
  misc_feature (2)..(3): Phosphorothioate linkage
  modified_base (3)..(3): 2' O-methyl modified nucleoside
  modified_base (4)..(4): 2' fluoro-modified nucleoside
  modified_base (5)..(5): 2' O-methyl modified nucleoside
  modified_base (6)..(6): 2' fluoro-modified nucleoside
  modified_base (7)..(7): 2' O-methyl modified nucleoside
  modified_base (8)..(8): 2' fluoro-modified nucleoside
  modified_base (9)..(9): 2' O-methyl modified nucleoside
  modified_base (10)..(10): 2' fluoro-modified nucleoside
  modified_base (11)..(11): 2' O-methyl modified nucleoside
  modified_base (12)..(12): 2' O-methyl modified nucleoside
  modified_base (13)..(13): 2' O-methyl modified nucleoside
  modified_base (14)..(14): 2' fluoro-modified nucleoside
  modified_base (15)..(15): 2' O-methyl modified nucleoside
  modified_base (16)..(16): 2' fluoro-modified nucleoside
  modified_base (17)..(17): 2' O-methyl modified nucleoside
  modified_base (18)..(18): 2' fluoro-modified nucleoside
  modified_base (19)..(19): 2' O-methyl modified nucleoside
  misc_feature (19)..(20): Phosphorothioate linkage
  modified_base (20)..(20): 2' O-methyl modified nucleoside
  misc_feature (20)..(21): Phosphorothioate linkage
  modified_base (21)..(21): 2' O-methyl modified nucleoside
uucguuccccacauugccauu

SEQ ID NO: 11281 - RNA, 21 nt, Artificial Sequence
  Description of Artificial Sequence: Synthetic oligonucleotide
  modified_base (1)..(1): 2' O-methyl modified nucleoside
  misc_feature (1)..(2): Phosphorothioate linkage
  modified_base (2)..(2): 2' fluoro-modified nucleoside
  misc_feature (2)..(3): Phosphorothioate linkage
  modified_base (3)..(3): 2' O-methyl modified nucleoside
  modified_base (4)..(4): 2' fluoro-modified nucleoside
  modified_base (5)..(5): 2' O-methyl modified nucleoside
  modified_base (6)..(6): 2' fluoro-modified nucleoside
  modified_base (7)..(7): 2' O-methyl modified nucleoside
  modified_base (8)..(8): 2' fluoro-modified nucleoside
  modified_base (9)..(9): 2' O-methyl modified nucleoside
  modified_base (10)..(10): 2' fluoro-modified nucleoside
  modified_base (11)..(11): 2' O-methyl modified nucleoside
  modified_base (12)..(12): 2' O-methyl modified nucleoside
  modified_base (13)..(13): 2' O-methyl modified nucleoside
  modified_base (14)..(14): 2' fluoro-modified nucleoside
  modified_base (15)..(15): 2' O-methyl modified nucleoside
  modified_base (16)..(16): 2' fluoro-modified nucleoside
  modified_base (17)..(17): 2' O-methyl modified nucleoside
  modified_base (18)..(18): 2' fluoro-modified nucleoside
  modified_base (19)..(19): 2' O-methyl modified nucleoside
  misc_feature (19)..(20): Phosphorothioate linkage
  modified_base (20)..(20): 2' O-methyl modified nucleoside
  misc_feature (20)..(21): Phosphorothioate linkage
  modified_base (21)..(21): 2' O-methyl modified nucleoside
ugucguuccccacauugccuu

SEQ ID NO: 11282 - RNA, 21 nt, Artificial Sequence
  Description of Artificial Sequence: Synthetic oligonucleotide
  modified_base (1)..(1): 2' O-methyl modified nucleoside
  misc_feature (1)..(2): Phosphorothioate linkage
  modified_base (2)..(2): 2' fluoro-modified nucleoside
  misc_feature (2)..(3): Phosphorothioate linkage
  modified_base (3)..(3): 2' O-methyl modified nucleoside
  modified_base (4)..(4): 2' fluoro-modified nucleoside
  modified_base (5)..(5): 2' O-methyl modified nucleoside
  modified_base (6)..(6): 2' fluoro-modified nucleoside
  modified_base (7)..(7): 2' O-methyl modified nucleoside
  modified_base (8)..(8): 2' fluoro-modified nucleoside
  modified_base (9)..(9): 2' O-methyl modified nucleoside
  modified_base (10)..(10): 2' fluoro-modified nucleoside
  modified_base (11)..(11): 2' O-methyl modified nucleoside
  modified_base (12)..(12): 2' O-methyl modified nucleoside
  modified_base (13)..(13): 2' O-methyl modified nucleoside
  modified_base (14)..(14): 2' fluoro-modified nucleoside
  modified_base (15)..(15): 2' O-methyl modified nucleoside
  modified_base (16)..(16): 2' fluoro-modified nucleoside
  modified_base (17)..(17): 2' O-methyl modified nucleoside
  modified_base (18)..(18): 2' fluoro-modified nucleoside
  modified_base (19)..(19): 2' O-methyl modified nucleoside
  misc_feature (19)..(20): Phosphorothioate linkage
  modified_base (20)..(20): 2' O-methyl modified nucleoside
  misc_feature (20)..(21): Phosphorothioate linkage
  modified_base (21)..(21): 2' O-methyl modified nucleoside
ucgucguuccccacauugcuu

SEQ ID NO: 11283 - RNA, 21 nt, Artificial Sequence
  Description of Artificial Sequence: Synthetic oligonucleotide
  modified_base (1)..(1): 2' O-methyl modified nucleoside
  misc_feature (1)..(2): Phosphorothioate linkage
  modified_base (2)..(2): 2' fluoro-modified nucleoside
  misc_feature (2)..(3): Phosphorothioate linkage
  modified_base (3)..(3): 2' O-methyl modified nucleoside
  modified_base (4)..(4): 2' fluoro-modified nucleoside
  modified_base (5)..(5): 2' O-methyl modified nucleoside
  modified_base (6)..(6): 2' fluoro-modified nucleoside
  modified_base (7)..(7): 2' O-methyl modified nucleoside
  modified_base (8)..(8): 2' fluoro-modified nucleoside
  modified_base (9)..(9): 2' O-methyl modified nucleoside
  modified_base (10)..(10): 2' fluoro-modified nucleoside
  modified_base (11)..(11): 2' O-methyl modified nucleoside
  modified_base (12)..(12): 2' O-methyl modified nucleoside
  modified_base (13)..(13): 2' O-methyl modified nucleoside
  modified_base (14)..(14): 2' fluoro-modified nucleoside
  modified_base (15)..(15): 2' O-methyl modified nucleoside
  modified_base (16)..(16): 2' fluoro-modified nucleoside
  modified_base (17)..(17): 2' O-methyl modified nucleoside
  modified_base (18)..(18): 2' fluoro-modified nucleoside
  modified_base (19)..(19): 2' O-methyl modified nucleoside
  misc_feature (19)..(20): Phosphorothioate linkage
  modified_base (20)..(20): 2' O-methyl modified nucleoside
  misc_feature (20)..(21): Phosphorothioate linkage
  modified_base (21)..(21): 2' O-methyl modified nucleoside
ugcgucguuccccacauuguu

SEQ ID NO: 11284 - RNA, 21 nt, Artificial Sequence
  Description of Artificial Sequence: Synthetic oligonucleotide
  modified_base (1)..(1): 2' O-methyl modified nucleoside
  misc_feature (1)..(2): Phosphorothioate linkage
  modified_base (2)..(2): 2' fluoro-modified nucleoside
  misc_feature (2)..(3): Phosphorothioate linkage
  modified_base (3)..(3): 2' O-methyl modified nucleoside
  modified_base (4)..(4): 2' fluoro-modified nucleoside
  modified_base (5)..(5): 2' O-methyl modified nucleoside
  modified_base (6)..(6): 2' fluoro-modified nucleoside
  modified_base (7)..(7): 2' O-methyl modified nucleoside
  modified_base (8)..(8): 2' fluoro-modified nucleoside
  modified_base (9)..(9): 2' O-methyl modified nucleoside
  modified_base (10)..(10): 2' fluoro-modified nucleoside
  modified_base (11)..(11): 2' O-methyl modified nucleoside
  modified_base (12)..(12): 2' O-methyl modified nucleoside
  modified_base (13)..(13): 2' O-methyl modified nucleoside
  modified_base (14)..(14): 2' fluoro-modified nucleoside
  modified_base (15)..(15): 2' O-methyl modified nucleoside
  modified_base (16)..(16): 2' fluoro-modified nucleoside
  modified_base (17)..(17): 2' O-methyl modified nucleoside
  modified_base (18)..(18): 2' fluoro-modified nucleoside
  modified_base (19)..(19): 2' O-methyl modified nucleoside
  misc_feature (19)..(20): Phosphorothioate linkage
  modified_base (20)..(20): 2' O-methyl modified nucleoside
  misc_feature (20)..(21): Phosphorothioate linkage
  modified_base (21)..(21): 2' O-methyl modified nucleoside
ucuggagggcgucguucccuu

SEQ ID NO: 11285 - RNA, 21 nt, Artificial Sequence
  Description of Artificial Sequence: Synthetic oligonucleotide
  modified_base (1)..(1): 2' O-methyl modified nucleoside
  misc_feature (1)..(2): Phosphorothioate linkage
  modified_base (2)..(2): 2' fluoro-modified nucleoside
  misc_feature (2)..(3): Phosphorothioate linkage
  modified_base (3)..(3): 2' O-methyl modified nucleoside
  modified_base (4)..(4): 2' fluoro-modified nucleoside
  modified_base (5)..(5): 2' O-methyl modified nucleoside
  modified_base (6)..(6): 2' fluoro-modified nucleoside
  modified_base (7)..(7): 2' O-methyl modified nucleoside
  modified_base (8)..(8): 2' fluoro-modified nucleoside
  modified_base (9)..(9): 2' O-methyl modified nucleoside
  modified_base (10)..(10): 2' fluoro-modified nucleoside
  modified_base (11)..(11): 2' O-methyl modified nucleoside
  modified_base (12)..(12): 2' O-methyl modified nucleoside
  modified_base (13)..(13): 2' O-methyl modified nucleoside
  modified_base (14)..(14): 2' fluoro-modified nucleoside
  modified_base (15)..(15): 2' O-methyl modified nucleoside
  modified_base (16)..(16): 2' fluoro-modified nucleoside
  modified_base (17)..(17): 2' O-methyl modified nucleoside
  modified_base (18)..(18): 2' fluoro-modified nucleoside
  modified_base (19)..(19): 2' O-methyl modified nucleoside
  misc_feature (19)..(20): Phosphorothioate linkage
  modified_base (20)..(20): 2' O-methyl modified nucleoside
  misc_feature (20)..(21): Phosphorothioate linkage
  modified_base (21)..(21): 2' O-methyl modified nucleoside
uuacuggagggcgucguucuu

SEQ ID NO: 11286 - RNA, 21 nt, Artificial Sequence
  Description of Artificial Sequence: Synthetic oligonucleotide
  modified_base (1)..(1): 2' O-methyl modified nucleoside
  misc_feature (1)..(2): Phosphorothioate linkage
  modified_base (2)..(2): 2' fluoro-modified nucleoside
  misc_feature (2)..(3): Phosphorothioate linkage
  modified_base (3)..(3): 2' O-methyl modified nucleoside
  modified_base (4)..(4): 2' fluoro-modified nucleoside
  modified_base (5)..(5): 2' O-methyl modified nucleoside
  modified_base (6)..(6): 2' fluoro-modified nucleoside
  modified_base (7)..(7): 2' O-methyl modified nucleoside
  modified_base (8)..(8): 2' fluoro-modified nucleoside
  modified_base (9)..(9): 2' O-methyl modified nucleoside
  modified_base (10)..(10): 2' fluoro-modified nucleoside
  modified_base (11)..(11): 2' O-methyl modified nucleoside
  modified_base (12)..(12): 2' O-methyl modified nucleoside
  modified_base (13)..(13): 2' O-methyl modified nucleoside
  modified_base (14)..(14): 2' fluoro-modified nucleoside
  modified_base (15)..(15): 2' O-methyl modified nucleoside
  modified_base (16)..(16): 2' fluoro-modified nucleoside
  modified_base (17)..(17): 2' O-methyl modified nucleoside
  modified_base (18)..(18): 2' fluoro-modified nucleoside
  modified_base (19)..(19): 2' O-methyl modified nucleoside
  misc_feature (19)..(20): Phosphorothioate linkage
  modified_base (20)..(20): 2' O-methyl modified nucleoside
  misc_feature (20)..(21): Phosphorothioate linkage
  modified_base (21)..(21): 2' O-methyl modified nucleoside
uauacuggagggcgucguuuu

SEQ ID NO: 11287 - RNA, 21 nt, Artificial Sequence
  Description of Artificial Sequence: Synthetic oligonucleotide
  modified_base (1)..(1): 2' O-methyl modified nucleoside
  misc_feature (1)..(2): Phosphorothioate linkage
  modified_base (2)..(2): 2' fluoro-modified nucleoside
  misc_feature (2)..(3): Phosphorothioate linkage
  modified_base (3)..(3): 2' O-methyl modified nucleoside
  modified_base (4)..(4): 2' fluoro-modified nucleoside
  modified_base (5)..(5): 2' O-methyl modified nucleoside
  modified_base (6)..(6): 2' fluoro-modified nucleoside
  modified_base (7)..(7): 2' O-methyl modified nucleoside
  modified_base (8)..(8): 2' fluoro-modified nucleoside
  modified_base (9)..(9): 2' O-methyl modified nucleoside
  modified_base (10)..(10): 2' fluoro-modified nucleoside
  modified_base (11)..(11): 2' O-methyl modified nucleoside
  modified_base (12)..(12): 2' O-methyl modified nucleoside
  modified_base (13)..(13): 2' O-methyl modified nucleoside
  modified_base (14)..(14): 2' fluoro-modified nucleoside
  modified_base (15)..(15): 2' O-methyl modified nucleoside
  modified_base (16)..(16): 2' fluoro-modified nucleoside
  modified_base (17)..(17): 2' O-methyl modified nucleoside
  modified_base (18)..(18): 2' fluoro-modified nucleoside
  modified_base (19)..(19): 2' O-methyl modified nucleoside
  misc_feature (19)..(20): Phosphorothioate linkage
  modified_base (20)..(20): 2' O-methyl modified nucleoside
  misc_feature (20)..(21): Phosphorothioate linkage
  modified_base (21)..(21): 2' O-methyl modified nucleoside
ugauacuggagggcgucguuu

SEQ ID NO: 11288 - RNA, 21 nt, Artificial Sequence
  Description of Artificial Sequence: Synthetic oligonucleotide
  modified_base (1)..(1): 2' O-methyl modified nucleoside
  misc_feature (1)..(2): Phosphorothioate linkage
  modified_base (2)..(2): 2' fluoro-modified nucleoside
  misc_feature (2)..(3): Phosphorothioate linkage
  modified_base (3)..(3): 2' O-methyl modified nucleoside
  modified_base (4)..(4): 2' fluoro-modified nucleoside
  modified_base (5)..(5): 2' O-methyl modified nucleoside
  modified_base (6)..(6): 2' fluoro-modified nucleoside
  modified_base (7)..(7): 2' O-methyl modified nucleoside
  modified_base (8)..(8): 2' fluoro-modified nucleoside
  modified_base (9)..(9): 2' O-methyl modified nucleoside
  modified_base (10)..(10): 2' fluoro-modified nucleoside
  modified_base (11)..(11): 2' O-methyl modified nucleoside
  modified_base (12)..(12): 2' O-methyl modified nucleoside
  modified_base (13)..(13): 2' O-methyl modified nucleoside
  modified_base (14)..(14): 2' fluoro-modified nucleoside
  modified_base (15)..(15): 2' O-methyl modified nucleoside
  modified_base (16)..(16): 2' fluoro-modified nucleoside
  modified_base (17)..(17): 2' O-methyl modified nucleoside
  modified_base (18)..(18): 2' fluoro-modified nucleoside
  modified_base (19)..(19): 2' O-methyl modified nucleoside
  misc_feature (19)..(20): Phosphorothioate linkage
  modified_base (20)..(20): 2' O-methyl modified nucleoside
  misc_feature (20)..(21): Phosphorothioate linkage
  modified_base (21)..(21): 2' O-methyl modified nucleoside
uguuaugauacuggagggcuu

SEQ ID NO: 11289 - RNA, 21 nt, Artificial Sequence
  Description of Artificial Sequence: Synthetic oligonucleotide
  modified_base (1)..(1): 2' O-methyl modified nucleoside
  misc_feature (1)..(2): Phosphorothioate linkage
  modified_base (2)..(2): 2' fluoro-modified nucleoside
  misc_feature (2)..(3): Phosphorothioate linkage
  modified_base (3)..(3): 2' O-methyl modified nucleoside
  modified_base (4)..(4): 2' fluoro-modified nucleoside
  modified_base (5)..(5): 2' O-methyl modified nucleoside
  modified_base (6)..(6): 2' fluoro-modified nucleoside
  modified_base (7)..(7): 2' O-methyl modified nucleoside
  modified_base (8)..(8): 2' fluoro-modified nucleoside
  modified_base (9)..(9): 2' O-methyl modified nucleoside
  modified_base (10)..(10): 2' fluoro-modified nucleoside
  modified_base (11)..(11): 2' O-methyl modified nucleoside
  modified_base (12)..(12): 2' O-methyl modified nucleoside
  modified_base (13)..(13): 2' O-methyl modified nucleoside
  modified_base (14)..(14): 2' fluoro-modified nucleoside
  modified_base (15)..(15): 2' O-methyl modified nucleoside
  modified_base (16)..(16): 2' fluoro-modified nucleoside
  modified_base (17)..(17): 2' O-methyl modified nucleoside
  modified_base (18)..(18): 2' fluoro-modified nucleoside
  modified_base (19)..(19): 2' O-methyl modified nucleoside
  misc_feature (19)..(20): Phosphorothioate linkage
  modified_base (20)..(20): 2' O-methyl modified nucleoside
  misc_feature (20)..(21): Phosphorothioate linkage
  modified_base (21)..(21): 2' O-methyl modified nucleoside
ucuguguuguuaugauacuuu

SEQ ID NO: 11290 - RNA, 21 nt, Artificial Sequence
  Description of Artificial Sequence: Synthetic oligonucleotide
  modified_base (1)..(1): 2' O-methyl modified nucleoside
  misc_feature (1)..(2): Phosphorothioate linkage
  modified_base (2)..(2): 2' fluoro-modified nucleoside
  misc_feature (2)..(3): Phosphorothioate linkage
  modified_base (3)..(3): 2' O-methyl modified nucleoside
  modified_base (4)..(4): 2' fluoro-modified nucleoside
  modified_base (5)..(5): 2' O-methyl modified nucleoside
  modified_base (6)..(6): 2' fluoro-modified nucleoside
  modified_base (7)..(7): 2' O-methyl modified nucleoside
  modified_base (8)..(8): 2' fluoro-modified nucleoside
  modified_base (9)..(9): 2' O-methyl modified nucleoside
  modified_base (10)..(10): 2' fluoro-modified nucleoside
  modified_base (11)..(11): 2' O-methyl modified nucleoside
  modified_base (12)..(12): 2' O-methyl modified nucleoside
  modified_base (13)..(13): 2' O-methyl modified nucleoside
  modified_base (14)..(14): 2' fluoro-modified nucleoside
  modified_base (15)..(15): 2' O-methyl modified nucleoside
  modified_base (16)..(16): 2' fluoro-modified nucleoside
  modified_base (17)..(17): 2' O-methyl modified nucleoside
  modified_base (18)..(18): 2' fluoro-modified nucleoside
  modified_base (19)..(19): 2' O-methyl modified nucleoside
  misc_feature (19)..(20): Phosphorothioate linkage
  modified_base (20)..(20): 2' O-methyl modified nucleoside
  misc_feature (20)..(21): Phosphorothioate linkage
  modified_base (21)..(21): 2' O-methyl modified nucleoside
uguagccaccuuugcggaguu

SEQ ID NO: 11291 - RNA, 21 nt, Artificial Sequence
  Description of Artificial Sequence: Synthetic oligonucleotide
  modified_base (1)..(1): 2' O-methyl modified nucleoside
  misc_feature (1)..(2): Phosphorothioate linkage
  modified_base (2)..(2): 2' fluoro-modified nucleoside
  misc_feature (2)..(3): Phosphorothioate linkage
  modified_base (3)..(3): 2' O-methyl modified nucleoside
  modified_base (4)..(4): 2' fluoro-modified nucleoside
  modified_base (5)..(5): 2' O-methyl modified nucleoside
  modified_base (6)..(6): 2' fluoro-modified nucleoside
  modified_base (7)..(7): 2' O-methyl modified nucleoside
  modified_base (8)..(8): 2' fluoro-modified nucleoside
  modified_base (9)..(9): 2' O-methyl modified nucleoside
  modified_base (10)..(10): 2' fluoro-modified nucleoside
  modified_base (11)..(11): 2' O-methyl modified nucleoside
  modified_base (12)..(12): 2' O-methyl modified nucleoside
  modified_base (13)..(13): 2' O-methyl modified nucleoside
  modified_base (14)..(14): 2' fluoro-modified nucleoside
  modified_base (15)..(15): 2' O-methyl modified nucleoside
  modified_base (16)..(16): 2' fluoro-modified nucleoside
  modified_base (17)..(17): 2' O-methyl modified nucleoside
  modified_base (18)..(18): 2' fluoro-modified nucleoside
  modified_base (19)..(19): 2' O-methyl modified nucleoside
  misc_feature (19)..(20): Phosphorothioate linkage
  modified_base (20)..(20): 2' O-methyl modified nucleoside
  misc_feature (20)..(21): Phosphorothioate linkage
  modified_base (21)..(21): 2' O-methyl modified nucleoside
uaguagccaccuuugcggauu

SEQ ID NO: 11292 - RNA, 21 nt, Artificial Sequence
  Description of Artificial Sequence: Synthetic oligonucleotide
  modified_base (1)..(1): 2' O-methyl modified nucleoside
  misc_feature (1)..(2): Phosphorothioate linkage
  modified_base (2)..(2): 2' fluoro-modified nucleoside
  misc_feature (2)..(3): Phosphorothioate linkage
  modified_base (3)..(3): 2' O-methyl modified nucleoside
  modified_base (4)..(4): 2' fluoro-modified nucleoside
  modified_base (5)..(5): 2' O-methyl modified nucleoside
  modified_base (6)..(6): 2' fluoro-modified nucleoside
  modified_base (7)..(7): 2' O-methyl modified nucleoside
  modified_base (8)..(8): 2' fluoro-modified nucleoside
  modified_base (9)..(9): 2' O-methyl modified nucleoside
  modified_base (10)..(10): 2' fluoro-modified nucleoside
  modified_base (11)..(11): 2' O-methyl modified nucleoside
  modified_base (12)..(12): 2' O-methyl modified nucleoside
  modified_base (13)..(13): 2' O-methyl modified nucleoside
  modified_base (14)..(14): 2' fluoro-modified nucleoside
  modified_base (15)..(15): 2' O-methyl modified nucleoside
  modified_base (16)..(16): 2' fluoro-modified nucleoside
  modified_base (17)..(17): 2' O-methyl modified nucleoside
  modified_base (18)..(18): 2' fluoro-modified nucleoside
  modified_base (19)..(19): 2' O-methyl modified nucleoside
  misc_feature (19)..(20): Phosphorothioate linkage
  modified_base (20)..(20): 2' O-methyl modified nucleoside
  misc_feature (20)..(21): Phosphorothioate linkage
  modified_base (21)..(21): 2' O-methyl modified nucleoside
uuaccaguagccaccuuuguu

SEQ ID NO: 11293 - RNA, 21 nt, Artificial Sequence
  Description of Artificial Sequence: Synthetic oligonucleotide
  modified_base (1)..(1): 2' O-methyl modified nucleoside
  misc_feature (1)..(2): Phosphorothioate linkage
  modified_base (2)..(2): 2' fluoro-modified nucleoside
  misc_feature (2)..(3): Phosphorothioate linkage
  modified_base (3)..(3): 2' O-methyl modified nucleoside
  modified_base (4)..(4): 2' fluoro-modified nucleoside
  modified_base (5)..(5): 2' O-methyl modified nucleoside
  modified_base (6)..(6): 2' fluoro-modified nucleoside
  modified_base (7)..(7): 2' O-methyl modified nucleoside
  modified_base (8)..(8): 2' fluoro-modified nucleoside
  modified_base (9)..(9): 2' O-methyl modified nucleoside
  modified_base (10)..(10): 2' fluoro-modified nucleoside
  modified_base (11)..(11): 2' O-methyl modified nucleoside
  modified_base (12)..(12): 2' O-methyl modified nucleoside
  modified_base (13)..(13): 2' O-methyl modified nucleoside
  modified_base (14)..(14): 2' fluoro-modified nucleoside
  modified_base (15)..(15): 2' O-methyl modified nucleoside
  modified_base (16)..(16): 2' fluoro-modified nucleoside
  modified_base (17)..(17): 2' O-methyl modified nucleoside
  modified_base (18)..(18): 2' fluoro-modified nucleoside
  modified_base (19)..(19): 2' O-methyl modified nucleoside
  misc_feature (19)..(20): Phosphorothioate linkage
  modified_base (20)..(20): 2' O-methyl modified nucleoside
  misc_feature (20)..(21): Phosphorothioate linkage
  modified_base (21)..(21): 2' O-methyl modified nucleoside
uuguaccaguagccaccuuuu

SEQ ID NO: 11294 - RNA, 21 nt, Artificial Sequence
  Description of Artificial Sequence: Synthetic oligonucleotide
  modified_base (1)..(1): 2' O-methyl modified nucleoside
  misc_feature (1)..(2): Phosphorothioate linkage
  modified_base (2)..(2): 2' fluoro-modified nucleoside
  misc_feature (2)..(3): Phosphorothioate linkage
  modified_base (3)..(3): 2' O-methyl modified nucleoside
  modified_base (4)..(4): 2' fluoro-modified nucleoside
  modified_base (5)..(5): 2' O-methyl modified nucleoside
  modified_base (6)..(6): 2' fluoro-modified nucleoside
  modified_base (7)..(7): 2' O-methyl modified nucleoside
  modified_base (8)..(8): 2' fluoro-modified nucleoside
  modified_base (9)..(9): 2' O-methyl modified nucleoside
  modified_base (10)..(10): 2' fluoro-modified nucleoside
  modified_base (11)..(11): 2' O-methyl modified nucleoside
  modified_base (12)..(12): 2' O-methyl modified nucleoside
  modified_base (13)..(13): 2' O-methyl modified nucleoside
  modified_base (14)..(14): 2' fluoro-modified nucleoside
  modified_base (15)..(15): 2' O-methyl modified nucleoside
  modified_base (16)..(16): 2' fluoro-modified nucleoside
  modified_base (17)..(17): 2' O-methyl modified nucleoside
  modified_base (18)..(18): 2' fluoro-modified nucleoside
  modified_base (19)..(19): 2' O-methyl modified nucleoside
  misc_feature (19)..(20): Phosphorothioate linkage
  modified_base (20)..(20): 2' O-methyl modified nucleoside
  misc_feature (20)..(21): Phosphorothioate linkage
  modified_base (21)..(21): 2' O-methyl modified nucleoside
uaguuguaccaguagccacuu

SEQ ID NO: 11295 - RNA, 21 nt, Artificial Sequence
  Description of Artificial Sequence: Synthetic oligonucleotide
  modified_base (1)..(1): 2' O-methyl modified nucleoside
  misc_feature (1)..(2): Phosphorothioate linkage
  modified_base (2)..(2): 2' fluoro-modified nucleoside
  misc_feature (2)..(3): Phosphorothioate linkage
  modified_base (3)..(3): 2' O-methyl modified nucleoside
  modified_base (4)..(4): 2' fluoro-modified nucleoside
  modified_base (5)..(5): 2' O-methyl modified nucleoside
  modified_base (6)..(6): 2' fluoro-modified nucleoside
  modified_base (7)..(7): 2' O-methyl modified nucleoside
  modified_base (8)..(8): 2' fluoro-modified nucleoside
  modified_base (9)..(9): 2' O-methyl modified nucleoside
  modified_base (10)..(10): 2' fluoro-modified nucleoside
  modified_base (11)..(11): 2' O-methyl modified nucleoside
  modified_base (12)..(12): 2' O-methyl modified nucleoside
  modified_base (13)..(13): 2' O-methyl modified nucleoside
  modified_base (14)..(14): 2' fluoro-modified nucleoside
  modified_base (15)..(15): 2' O-methyl modified nucleoside
  modified_base (16)..(16): 2' fluoro-modified nucleoside
  modified_base (17)..(17): 2' O-methyl modified nucleoside
  modified_base (18)..(18): 2' fluoro-modified nucleoside
  modified_base (19)..(19): 2' O-methyl modified nucleoside
  misc_feature (19)..(20): Phosphorothioate linkage
  modified_base (20)..(20): 2' O-methyl modified nucleoside
  misc_feature (20)..(21): Phosphorothioate linkage
  modified_base (21)..(21): 2' O-methyl modified nucleoside
uugugcagcaguuguaccauu

SEQ ID NO: 11296 - RNA, 21 nt, Artificial Sequence
  Description of Artificial Sequence: Synthetic oligonucleotide
  modified_base (1)..(1): 2' O-methyl modified nucleoside
  misc_feature (1)..(2): Phosphorothioate linkage
  modified_base (2)..(2): 2' fluoro-modified nucleoside
  misc_feature (2)..(3): Phosphorothioate linkage
  modified_base (3)..(3): 2' O-methyl modified nucleoside
  modified_base (4)..(4): 2' fluoro-modified nucleoside
  modified_base (5)..(5): 2' O-methyl modified nucleoside
  modified_base (6)..(6): 2' fluoro-modified nucleoside
  modified_base (7)..(7): 2' O-methyl modified nucleoside
  modified_base (8)..(8): 2' fluoro-modified nucleoside
  modified_base (9)..(9): 2' O-methyl modified nucleoside
  modified_base (10)..(10): 2' fluoro-modified nucleoside
  modified_base (11)..(11): 2' O-methyl modified nucleoside
  modified_base (12)..(12): 2' O-methyl modified nucleoside
  modified_base (13)..(13): 2' O-methyl modified nucleoside
  modified_base (14)..(14): 2' fluoro-modified nucleoside
  modified_base (15)..(15): 2' O-methyl modified nucleoside
  modified_base (16)..(16): 2' fluoro-modified nucleoside
  modified_base (17)..(17): 2' O-methyl modified nucleoside
  modified_base (18)..(18): 2' fluoro-modified nucleoside
  modified_base (19)..(19): 2' O-methyl modified nucleoside
  misc_feature (19)..(20): Phosphorothioate linkage
  modified_base (20)..(20): 2' O-methyl modified nucleoside
  misc_feature (20)..(21): Phosphorothioate linkage
  modified_base (21)..(21): 2' O-methyl modified nucleoside
uucugugcagcaguuguacuu

SEQ ID NO: 11297 - RNA, 21 nt, Artificial Sequence
  Description of Artificial Sequence: Synthetic oligonucleotide
  modified_base (1)..(1): 2' O-methyl modified nucleoside
  misc_feature (1)..(2): Phosphorothioate linkage
  modified_base (2)..(2): 2' fluoro-modified nucleoside
  misc_feature (2)..(3): Phosphorothioate linkage
  modified_base (3)..(3): 2' O-methyl modified nucleoside
  modified_base (4)..(4): 2' fluoro-modified nucleoside
  modified_base (5)..(5): 2' O-methyl modified nucleoside
  modified_base (6)..(6): 2' fluoro-modified nucleoside
  modified_base (7)..(7): 2' O-methyl modified nucleoside
  modified_base (8)..(8): 2' fluoro-modified nucleoside
  modified_base (9)..(9): 2' O-methyl modified nucleoside
  modified_base (10)..(10): 2' fluoro-modified nucleoside
  modified_base (11)..(11): 2' O-methyl modified nucleoside
  modified_base (12)..(12): 2' O-methyl modified nucleoside
  modified_base (13)..(13): 2' O-methyl modified nucleoside
  modified_base (14)..(14): 2' fluoro-modified nucleoside
  modified_base (15)..(15): 2' O-methyl modified nucleoside
  modified_base (16)..(16): 2' fluoro-modified nucleoside
  modified_base (17)..(17): 2' O-methyl modified nucleoside
  modified_base (18)..(18): 2' fluoro-modified nucleoside
  modified_base (19)..(19): 2' O-methyl modified nucleoside
  misc_feature (19)..(20): Phosphorothioate linkage
  modified_base (20)..(20): 2' O-methyl modified nucleoside
  misc_feature (20)..(21): Phosphorothioate linkage
  modified_base (21)..(21): 2' O-methyl modified nucleoside
uuaguacacuccauugagguu

SEQ ID NO: 11298 - RNA, 21 nt, Artificial Sequence
  Description of Artificial Sequence: Synthetic oligonucleotide
  modified_base (1)..(1): 2' O-methyl modified nucleoside
  misc_feature (1)..(2): Phosphorothioate linkage
  modified_base (2)..(2): 2' fluoro-modified nucleoside
  misc_feature (2)..(3): Phosphorothioate linkage
  modified_base (3)..(3): 2' O-methyl modified nucleoside
  modified_base (4)..(4): 2' fluoro-modified nucleoside
  modified_base (5)..(5): 2' O-methyl modified nucleoside
  modified_base (6)..(6): 2' fluoro-modified nucleoside
  modified_base (7)..(7): 2' O-methyl modified nucleoside
  modified_base (8)..(8): 2' fluoro-modified nucleoside
  modified_base (9)..(9): 2' O-methyl modified nucleoside
  modified_base (10)..(10): 2' fluoro-modified nucleoside
  modified_base (11)..(11): 2' O-methyl modified nucleoside
  modified_base (12)..(12): 2' O-methyl modified nucleoside
  modified_base (13)..(13): 2' O-methyl modified nucleoside
  modified_base (14)..(14): 2' fluoro-modified nucleoside
  modified_base (15)..(15): 2' O-methyl modified nucleoside
  modified_base (16)..(16): 2' fluoro-modified nucleoside
  modified_base (17)..(17): 2' O-methyl modified nucleoside
  modified_base (18)..(18): 2' fluoro-modified nucleoside
  modified_base (19)..(19): 2' O-methyl modified nucleoside
  misc_feature (19)..(20): Phosphorothioate linkage
  modified_base (20)..(20): 2' O-methyl modified nucleoside
  misc_feature (20)..(21): Phosphorothioate linkage
  modified_base (21)..(21): 2' O-methyl modified nucleoside
uguaguacacuccauugaguu

SEQ ID NO: 11299 - RNA, 21 nt, Artificial Sequence
  Description of Artificial Sequence: Synthetic oligonucleotide
  modified_base (1)..(1): 2' O-methyl modified nucleoside
  misc_feature (1)..(2): Phosphorothioate linkage
  modified_base (2)..(2): 2' fluoro-modified nucleoside
  misc_feature (2)..(3): Phosphorothioate linkage
  modified_base (3)..(3): 2' O-methyl modified nucleoside
  modified_base (4)..(4): 2' fluoro-modified nucleoside
  modified_base (5)..(5): 2' O-methyl modified nucleoside
  modified_base (6)..(6): 2' fluoro-modified nucleoside
  modified_base (7)..(7): 2' O-methyl modified nucleoside
  modified_base (8)..(8): 2' fluoro-modified nucleoside
  modified_base (9)..(9): 2' O-methyl modified nucleoside
  modified_base (10)..(10): 2' fluoro-modified nucleoside
  modified_base (11)..(11): 2' O-methyl modified nucleoside
  modified_base (12)..(12): 2' O-methyl modified nucleoside
  modified_base (13)..(13): 2' O-methyl modified nucleoside
  modified_base (14)..(14): 2' fluoro-modified nucleoside
  modified_base (15)..(15): 2' O-methyl modified nucleoside
  modified_base (16)..(16): 2' fluoro-modified nucleoside
  modified_base (17)..(17): 2' O-methyl modified nucleoside
  modified_base (18)..(18): 2' fluoro-modified nucleoside
  modified_base (19)..(19): 2' O-methyl modified nucleoside
  misc_feature (19)..(20): Phosphorothioate linkage
  modified_base (20)..(20): 2' O-methyl modified nucleoside
  misc_feature (20)..(21): Phosphorothioate linkage
  modified_base (21)..(21): 2' O-methyl modified nucleoside
ugguaguacacuccauugauu

SEQ ID NO: 11300 - RNA, 21 nt, Artificial Sequence
  Description of Artificial Sequence: Synthetic oligonucleotide
  modified_base (1)..(1): 2' O-methyl modified nucleoside
  misc_feature (1)..(2): Phosphorothioate linkage
  modified_base (2)..(2): 2' fluoro-modified nucleoside
  misc_feature (2)..(3): Phosphorothioate linkage
  modified_base (3)..(3): 2' O-methyl modified nucleoside
  modified_base (4)..(4): 2' fluoro-modified nucleoside
  modified_base (5)..(5): 2' O-methyl modified nucleoside
  modified_base (6)..(6): 2' fluoro-modified nucleoside
  modified_base (7)..(7): 2' O-methyl modified nucleoside
  modified_base (8)..(8): 2' fluoro-modified nucleoside
  modified_base (9)..(9): 2' O-methyl modified nucleoside
  modified_base (10)..(10): 2' fluoro-modified nucleoside
  modified_base (11)..(11): 2' O-methyl modified nucleoside
  modified_base (12)..(12): 2' O-methyl modified nucleoside
  modified_base (13)..(13): 2' O-methyl modified nucleoside
  modified_base (14)..(14): 2' fluoro-modified nucleoside
  modified_base (15)..(15): 2' O-methyl modified nucleoside
  modified_base (16)..(16): 2' fluoro-modified nucleoside
  modified_base (17)..(17): 2' O-methyl modified nucleoside
  modified_base (18)..(18): 2' fluoro-modified nucleoside
  modified_base (19)..(19): 2' O-methyl modified nucleoside
  misc_feature (19)..(20): Phosphorothioate linkage
  modified_base (20)..(20): 2' O-methyl modified nucleoside
  misc_feature (20)..(21): Phosphorothioate linkage
  modified_base (21)..(21): 2' O-methyl modified nucleoside
ucgguaguacacuccauuguu

SEQ ID NO: 11301 - RNA, 21 nt, Artificial Sequence
  Description of Artificial Sequence: Synthetic oligonucleotide
  modified_base (1)..(1): 2' O-methyl modified nucleoside
  misc_feature (1)..(2): Phosphorothioate linkage
  modified_base (2)..(2): 2' fluoro-modified nucleoside
  misc_feature (2)..(3): Phosphorothioate linkage
  modified_base (3)..(3): 2' O-methyl modified nucleoside
  modified_base (4)..(4): 2' fluoro-modified nucleoside
  modified_base (5)..(5): 2' O-methyl modified nucleoside
  modified_base (6)..(6): 2' fluoro-modified nucleoside
  modified_base (7)..(7): 2' O-methyl modified nucleoside
  modified_base (8)..(8): 2' fluoro-modified nucleoside
  modified_base (9)..(9): 2' O-methyl modified nucleoside
  modified_base (10)..(10): 2' fluoro-modified nucleoside
  modified_base (11)..(11): 2' O-methyl modified nucleoside
  modified_base (12)..(12): 2' O-methyl modified nucleoside
  modified_base (13)..(13): 2' O-methyl modified nucleoside
  modified_base (14)..(14): 2' fluoro-modified nucleoside
  modified_base (15)..(15): 2' O-methyl modified nucleoside
  modified_base (16)..(16): 2' fluoro-modified nucleoside
  modified_base (17)..(17): 2' O-methyl modified nucleoside
  modified_base (18)..(18): 2' fluoro-modified nucleoside
  modified_base (19)..(19): 2' O-methyl modified nucleoside
  misc_feature (19)..(20): Phosphorothioate linkage
  modified_base (20)..(20): 2' O-methyl modified nucleoside
  misc_feature (20)..(21): Phosphorothioate linkage
  modified_base (21)..(21): 2' O-methyl modified nucleoside
uguagguagauccaugccauu

SEQ ID NO: 11302 - RNA, 21 nt, Artificial Sequence
  Description of Artificial Sequence: Synthetic oligonucleotide
  modified_base (1)..(1): 2' O-methyl modified nucleoside
  misc_feature (1)..(2): Phosphorothioate linkage
  modified_base (2)..(2): 2' fluoro-modified nucleoside
  misc_feature (2)..(3): Phosphorothioate linkage
  modified_base (3)..(3): 2' O-methyl modified nucleoside
  modified_base (4)..(4): 2' fluoro-modified nucleoside
  modified_base (5)..(5): 2' O-methyl modified nucleoside
  modified_base (6)..(6): 2' fluoro-modified nucleoside
  modified_base (7)..(7): 2' O-methyl modified nucleoside
  modified_base (8)..(8): 2' fluoro-modified nucleoside
  modified_base (9)..(9): 2' O-methyl modified nucleoside
  modified_base (10)..(10): 2' fluoro-modified nucleoside
  modified_base (11)..(11): 2' O-methyl modified nucleoside
  modified_base (12)..(12): 2' O-methyl modified nucleoside
  modified_base (13)..(13): 2' O-methyl modified nucleoside
  modified_base (14)..(14): 2' fluoro-modified nucleoside
  modified_base (15)..(15): 2' O-methyl modified nucleoside
  modified_base (16)..(16): 2' fluoro-modified nucleoside
  modified_base (17)..(17): 2' O-methyl modified nucleoside
  modified_base (18)..(18): 2' fluoro-modified nucleoside
  modified_base (19)..(19): 2' O-methyl modified nucleoside
  misc_feature (19)..(20): Phosphorothioate linkage
  modified_base (20)..(20): 2' O-methyl modified nucleoside
  misc_feature (20)..(21): Phosphorothioate linkage
  modified_base (21)..(21): 2' O-methyl modified nucleoside
uaguagguagauccaugccuu

SEQ ID NO: 11303 - RNA, 21 nt, Artificial Sequence
  Description of Artificial Sequence: Synthetic oligonucleotide
  modified_base (1)..(1): 2' O-methyl modified nucleoside
  misc_feature (1)..(2): Phosphorothioate linkage
  modified_base (2)..(2): 2' fluoro-modified nucleoside
  misc_feature (2)..(3): Phosphorothioate linkage
  modified_base (3)..(3): 2' O-methyl modified nucleoside
  modified_base (4)..(4): 2' fluoro-modified nucleoside
  modified_base (5)..(5): 2' O-methyl modified nucleoside
  modified_base (6)..(6): 2' fluoro-modified nucleoside
  modified_base (7)..(7): 2' O-methyl modified nucleoside
  modified_base (8)..(8): 2' fluoro-modified nucleoside
  modified_base (9)..(9): 2' O-methyl modified nucleoside
  modified_base (10)..(10): 2' fluoro-modified nucleoside
  modified_base (11)..(11): 2' O-methyl modified nucleoside
  modified_base (12)..(12): 2' O-methyl modified nucleoside
  modified_base (13)..(13): 2' O-methyl modified nucleoside
  modified_base (14)..(14): 2' fluoro-modified nucleoside
  modified_base (15)..(15): 2' O-methyl modified nucleoside
  modified_base (16)..(16): 2' fluoro-modified nucleoside
  modified_base (17)..(17): 2' O-methyl modified nucleoside
  modified_base (18)..(18): 2' fluoro-modified nucleoside
  modified_base (19)..(19): 2' O-methyl modified nucleoside
  misc_feature (19)..(20): Phosphorothioate linkage
  modified_base (20)..(20): 2' O-methyl modified nucleoside
  misc_feature (20)..(21): Phosphorothioate linkage
  modified_base (21)..(21): 2' O-methyl modified nucleoside
uggaguagguagauccauguu

SEQ ID NO: 11304 - RNA, 21 nt, Artificial Sequence
  Description of Artificial Sequence: Synthetic oligonucleotide
  modified_base (1)..(1): 2' O-methyl modified nucleoside
  misc_feature (1)..(2): Phosphorothioate linkage
  modified_base (2)..(2): 2' fluoro-modified nucleoside
  misc_feature (2)..(3): Phosphorothioate linkage
  modified_base (3)..(3): 2' O-methyl modified nucleoside
  modified_base (4)..(4): 2' fluoro-modified nucleoside
  modified_base (5)..(5): 2' O-methyl modified nucleoside
  modified_base (6)..(6): 2' fluoro-modified nucleoside
  modified_base (7)..(7): 2' O-methyl modified nucleoside
  modified_base (8)..(8): 2' fluoro-modified nucleoside
  modified_base (9)..(9): 2' O-methyl modified nucleoside
  modified_base (10)..(10): 2' fluoro-modified nucleoside
  modified_base (11)..(11): 2' O-methyl modified nucleoside
  modified_base (12)..(12): 2' O-methyl modified nucleoside
  modified_base (13)..(13): 2' O-methyl modified nucleoside
  modified_base (14)..(14): 2' fluoro-modified nucleoside
  modified_base (15)..(15): 2' O-methyl modified nucleoside
  modified_base (16)..(16): 2' fluoro-modified nucleoside
  modified_base (17)..(17): 2' O-methyl modified nucleoside
  modified_base (18)..(18): 2' fluoro-modified nucleoside
  modified_base (19)..(19): 2' O-methyl modified nucleoside
  misc_feature (19)..(20): Phosphorothioate linkage
  modified_base (20)..(20): 2' O-methyl modified nucleoside
  misc_feature (20)..(21): Phosphorothioate linkage
  modified_base (21)..(21): 2' O-methyl modified nucleoside
ugggaguagguagauccauuu

SEQ ID NO: 11305 - RNA, 21 nt, Artificial Sequence
  Description of Artificial Sequence: Synthetic oligonucleotide
  modified_base (1)..(1): 2' O-methyl modified nucleoside
  misc_feature (1)..(2): Phosphorothioate linkage
  modified_base (2)..(2): 2' fluoro-modified nucleoside
  misc_feature (2)..(3): Phosphorothioate linkage
  modified_base (3)..(3): 2' O-methyl modified nucleoside
  modified_base (4)..(4): 2' fluoro-modified nucleoside
  modified_base (5)..(5): 2' O-methyl modified nucleoside
  modified_base (6)..(6): 2' fluoro-modified nucleoside
  modified_base (7)..(7): 2' O-methyl modified nucleoside
  modified_base (8)..(8): 2' fluoro-modified nucleoside
  modified_base (9)..(9): 2' O-methyl modified nucleoside
  modified_base (10)..(10): 2' fluoro-modified nucleoside
  modified_base (11)..(11): 2' O-methyl modified nucleoside
  modified_base (12)..(12): 2' O-methyl modified nucleoside
  modified_base (13)..(13): 2' O-methyl modified nucleoside
  modified_base (14)..(14): 2' fluoro-modified nucleoside
  modified_base (15)..(15): 2' O-methyl modified nucleoside
  modified_base (16)..(16): 2' fluoro-modified nucleoside
  modified_base (17)..(17): 2' O-methyl modified nucleoside
  modified_base (18)..(18): 2' fluoro-modified nucleoside
  modified_base (19)..(19): 2' O-methyl modified nucleoside
  misc_feature (19)..(20): Phosphorothioate linkage
  modified_base (20)..(20): 2' O-methyl modified nucleoside
  misc_feature (20)..(21): Phosphorothioate linkage
  modified_base (21)..(21): 2' O-methyl modified nucleoside
ucggcagccuccuuuuaaguu

SEQ ID NO: 11306 - RNA, 21 nt, Artificial Sequence
  Description of Artificial Sequence: Synthetic oligonucleotide
  modified_base (1)..(1): 2' O-methyl modified nucleoside
  misc_feature (1)..(2): Phosphorothioate linkage
  modified_base (2)..(2): 2' fluoro-modified nucleoside
  misc_feature (2)..(3): Phosphorothioate linkage
  modified_base (3)..(3): 2' O-methyl modified nucleoside
  modified_base (4)..(4): 2' fluoro-modified nucleoside
  modified_base (5)..(5): 2' O-methyl modified nucleoside
  modified_base (6)..(6): 2' fluoro-modified nucleoside
  modified_base (7)..(7): 2' O-methyl modified nucleoside
  modified_base (8)..(8): 2' fluoro-modified nucleoside
  modified_base (9)..(9): 2' O-methyl modified nucleoside
  modified_base (10)..(10): 2' fluoro-modified nucleoside
  modified_base (11)..(11): 2' O-methyl modified nucleoside
  modified_base (12)..(12): 2' O-methyl modified nucleoside
  modified_base (13)..(13): 2' O-methyl modified nucleoside
  modified_base (14)..(14): 2' fluoro-modified nucleoside
  modified_base (15)..(15): 2' O-methyl modified nucleoside
  modified_base (16)..(16): 2' fluoro-modified nucleoside
  modified_base (17)..(17): 2' O-methyl modified nucleoside
  modified_base (18)..(18): 2' fluoro-modified nucleoside
  modified_base (19)..(19): 2' O-methyl modified nucleoside
  misc_feature (19)..(20): Phosphorothioate linkage
  modified_base (20)..(20): 2' O-methyl modified nucleoside
  misc_feature (20)..(21): Phosphorothioate linkage
  modified_base (21)..(21): 2' O-methyl modified nucleoside
uaacauccuugguacauauuu

SEQ ID NO: 11307 - RNA, 21 nt, Artificial Sequence
  Description of Artificial Sequence: Synthetic oligonucleotide
  modified_base (1)..(1): 2' O-methyl modified nucleoside
  misc_feature (1)..(2): Phosphorothioate linkage
  modified_base (2)..(2): 2' fluoro-modified nucleoside
  misc_feature (2)..(3): Phosphorothioate linkage
  modified_base (3)..(3): 2' O-methyl modified nucleoside
  modified_base (4)..(4): 2' fluoro-modified nucleoside
  modified_base (5)..(5): 2' O-methyl modified nucleoside
  modified_base (6)..(6): 2' fluoro-modified nucleoside
  modified_base (7)..(7): 2' O-methyl modified nucleoside
  modified_base (8)..(8): 2' fluoro-modified nucleoside
  modified_base (9)..(9): 2' O-methyl modified nucleoside
  modified_base (10)..(10): 2' fluoro-modified nucleoside
  modified_base (11)..(11): 2' O-methyl modified nucleoside
  modified_base (12)..(12): 2' O-methyl modified nucleoside
  modified_base (13)..(13): 2' O-methyl modified nucleoside
  modified_base (14)..(14): 2' fluoro-modified nucleoside
  modified_base (15)..(15): 2' O-methyl modified nucleoside
  modified_base (16)..(16): 2' fluoro-modified nucleoside
  modified_base (17)..(17): 2' O-methyl modified nucleoside
  modified_base (18)..(18): 2' fluoro-modified nucleoside
  modified_base (19)..(19): 2' O-methyl modified nucleoside
  misc_feature (19)..(20): Phosphorothioate linkage
  modified_base (20)..(20): 2' O-methyl modified nucleoside
  misc_feature (20)..(21): Phosphorothioate linkage
  modified_base (21)..(21): 2' O-methyl modified nucleoside
uuguaacauccuugguacauu

SEQ ID NO: 11308 - RNA, 21 nt, Artificial Sequence
  Description of Artificial Sequence: Synthetic oligonucleotide
  modified_base (1)..(1): 2' O-methyl modified nucleoside
  misc_feature (1)..(2): Phosphorothioate linkage
  modified_base (2)..(2): 2' fluoro-modified nucleoside
  misc_feature (2)..(3): Phosphorothioate linkage
  modified_base (3)..(3): 2' O-methyl modified nucleoside
  modified_base (4)..(4): 2' fluoro-modified nucleoside
  modified_base (5)..(5): 2' O-methyl modified nucleoside
  modified_base (6)..(6): 2' fluoro-modified nucleoside
  modified_base (7)..(7): 2' O-methyl modified nucleoside
  modified_base (8)..(8): 2' fluoro-modified nucleoside
  modified_base (9)..(9): 2' O-methyl modified nucleoside
  modified_base (10)..(10): 2' fluoro-modified nucleoside
  modified_base (11)..(11): 2' O-methyl modified nucleoside
  modified_base (12)..(12): 2' O-methyl modified nucleoside
  modified_base (13)..(13): 2' O-methyl modified nucleoside
  modified_base (14)..(14): 2' fluoro-modified nucleoside
  modified_base (15)..(15): 2' O-methyl modified nucleoside
  modified_base (16)..(16): 2' fluoro-modified nucleoside
  modified_base (17)..(17): 2' O-methyl modified nucleoside
  modified_base (18)..(18): 2' fluoro-modified nucleoside
  modified_base (19)..(19): 2' O-methyl modified nucleoside
  misc_feature (19)..(20): Phosphorothioate linkage
  modified_base (20)..(20): 2' O-methyl modified nucleoside
  misc_feature (20)..(21): Phosphorothioate linkage
  modified_base (21)..(21): 2' O-methyl modified nucleoside
uuguuuacuguaacauccuuu

SEQ ID NO: 11309 - RNA, 21 nt, Artificial Sequence
  Description of Artificial Sequence: Synthetic oligonucleotide
  modified_base (1)..(1): 2' O-methyl modified nucleoside
  misc_feature (1)..(2): Phosphorothioate linkage
  modified_base (2)..(2): 2' fluoro-modified nucleoside
  misc_feature (2)..(3): Phosphorothioate linkage
  modified_base (3)..(3): 2' O-methyl modified nucleoside
  modified_base (4)..(4): 2' fluoro-modified nucleoside
  modified_base (5)..(5): 2' O-methyl modified nucleoside
  modified_base (6)..(6): 2' fluoro-modified nucleoside
  modified_base (7)..(7): 2' O-methyl modified nucleoside
  modified_base (8)..(8): 2' fluoro-modified nucleoside
  modified_base (9)..(9): 2' O-methyl modified nucleoside
  modified_base (10)..(10): 2' fluoro-modified nucleoside
  modified_base (11)..(11): 2' O-methyl modified nucleoside
  modified_base (12)..(12): 2' O-methyl modified nucleoside
  modified_base (13)..(13): 2' O-methyl modified nucleoside
  modified_base (14)..(14): 2' fluoro-modified nucleoside
  modified_base (15)..(15): 2' O-methyl modified nucleoside
  modified_base (16)..(16): 2' fluoro-modified nucleoside
  modified_base (17)..(17): 2' O-methyl modified nucleoside
  modified_base (18)..(18): 2' fluoro-modified nucleoside
  modified_base (19)..(19): 2' O-methyl modified nucleoside
  misc_feature (19)..(20): Phosphorothioate linkage
  modified_base (20)..(20): 2' O-methyl modified nucleoside
  misc_feature (20)..(21): Phosphorothioate linkage
  modified_base (21)..(21): 2' O-methyl modified nucleoside
ucuguuuacuguaacauccuu

SEQ ID NO: 11310 - RNA, 21 nt, Artificial Sequence
  Description of Artificial Sequence: Synthetic oligonucleotide
  modified_base (1)..(1): 2' O-methyl modified nucleoside
  misc_feature (1)..(2): Phosphorothioate linkage
  modified_base (2)..(2): 2' fluoro-modified nucleoside
  misc_feature (2)..(3): Phosphorothioate linkage
  modified_base (3)..(3): 2' O-methyl modified nucleoside
  modified_base (4)..(4): 2' fluoro-modified nucleoside
  modified_base (5)..(5): 2' O-methyl modified nucleoside
  modified_base (6)..(6): 2' fluoro-modified nucleoside
  modified_base (7)..(7): 2' O-methyl modified nucleoside
  modified_base (8)..(8): 2' fluoro-modified nucleoside
  modified_base (9)..(9): 2' O-methyl modified nucleoside
  modified_base (10)..(10): 2' fluoro-modified nucleoside
  modified_base (11)..(11): 2' O-methyl modified nucleoside
  modified_base (12)..(12): 2' O-methyl modified nucleoside
  modified_base (13)..(13): 2' O-methyl modified nucleoside
  modified_base (14)..(14): 2' fluoro-modified nucleoside
  modified_base (15)..(15): 2' O-methyl modified nucleoside
  modified_base (16)..(16): 2' fluoro-modified nucleoside
  modified_base (17)..(17): 2' O-methyl modified nucleoside
  modified_base (18)..(18): 2' fluoro-modified nucleoside
  modified_base (19)..(19): 2' O-methyl modified nucleoside
  misc_feature (19)..(20): Phosphorothioate linkage
  modified_base (20)..(20): 2' O-methyl modified nucleoside
  misc_feature (20)..(21): Phosphorothioate linkage
  modified_base (21)..(21): 2' O-methyl modified nucleoside
uaggacccaguggguuuaauu

SEQ ID NO: 11311 - RNA, 21 nt, Artificial Sequence
  Description of Artificial Sequence: Synthetic oligonucleotide
  modified_base (1)..(1): 2' O-methyl modified nucleoside
  misc_feature (1)..(2): Phosphorothioate linkage
  modified_base (2)..(2): 2' fluoro-modified nucleoside
  misc_feature (2)..(3): Phosphorothioate linkage
  modified_base (3)..(3): 2' O-methyl modified nucleoside
  modified_base (4)..(4): 2' fluoro-modified nucleoside
  modified_base (5)..(5): 2' O-methyl modified nucleoside
  modified_base (6)..(6): 2' fluoro-modified nucleoside
  modified_base (7)..(7): 2' O-methyl modified nucleoside
  modified_base (8)..(8): 2' fluoro-modified nucleoside
  modified_base (9)..(9): 2' O-methyl modified nucleoside
  modified_base (10)..(10): 2' fluoro-modified nucleoside
  modified_base (11)..(11): 2' O-methyl modified nucleoside
  modified_base (12)..(12): 2' O-methyl modified nucleoside
  modified_base (13)..(13): 2' O-methyl modified nucleoside
  modified_base (14)..(14): 2' fluoro-modified nucleoside
  modified_base (15)..(15): 2' O-methyl modified nucleoside
  modified_base (16)..(16): 2' fluoro-modified nucleoside
  modified_base (17)..(17): 2' O-methyl modified nucleoside
  modified_base (18)..(18): 2' fluoro-modified nucleoside
  modified_base (19)..(19): 2' O-methyl modified nucleoside
  misc_feature (19)..(20): Phosphorothioate linkage
  modified_base (20)..(20): 2' O-methyl modified nucleoside
  misc_feature (20)..(21): Phosphorothioate linkage
  modified_base (21)..(21): 2' O-methyl modified nucleoside
uuaugucagggaucuuggguu

SEQ ID NO: 11312 - RNA, 21 nt, Artificial Sequence
  Description of Artificial Sequence: Synthetic oligonucleotide
  modified_base (1)..(1): 2' O-methyl modified nucleoside
  misc_feature (1)..(2): Phosphorothioate linkage
  modified_base (2)..(2): 2' fluoro-modified nucleoside
  misc_feature (2)..(3): Phosphorothioate linkage
  modified_base (3)..(3): 2' O-methyl modified nucleoside
  modified_base (4)..(4): 2' fluoro-modified nucleoside
  modified_base (5)..(5): 2' O-methyl modified nucleoside
  modified_base (6)..(6): 2' fluoro-modified nucleoside
  modified_base (7)..(7): 2' O-methyl modified nucleoside
  modified_base (8)..(8): 2' fluoro-modified nucleoside
  modified_base (9)..(9): 2' O-methyl modified nucleoside
  modified_base (10)..(10): 2' fluoro-modified nucleoside
  modified_base (11)..(11): 2' O-methyl modified nucleoside
  modified_base (12)..(12): 2' O-methyl modified nucleoside
  modified_base (13)..(13): 2' O-methyl modified nucleoside
  modified_base (14)..(14): 2' fluoro-modified nucleoside
  modified_base (15)..(15): 2' O-methyl modified nucleoside
  modified_base (16)..(16): 2' fluoro-modified nucleoside
  modified_base (17)..(17): 2' O-methyl modified nucleoside
  modified_base (18)..(18): 2' fluoro-modified nucleoside
  modified_base (19)..(19): 2' O-methyl modified nucleoside
  misc_feature (19)..(20): Phosphorothioate linkage
  modified_base (20)..(20): 2' O-methyl modified nucleoside
  misc_feature (20)..(21): Phosphorothioate linkage
  modified_base (21)..(21): 2' O-methyl modified nucleoside
ucuaugucagggaucuugguu

SEQ ID NO: 11313 - RNA, 21 nt, Artificial Sequence
  Description of Artificial Sequence: Synthetic oligonucleotide
  modified_base (1)..(1): 2' O-methyl modified nucleoside
  misc_feature (1)..(2): Phosphorothioate linkage
  modified_base (2)..(2): 2' fluoro-modified nucleoside
  misc_feature (2)..(3): Phosphorothioate linkage
  modified_base (3)..(3): 2' O-methyl modified nucleoside
  modified_base (4)..(4): 2' fluoro-modified nucleoside
  modified_base (5)..(5): 2' O-methyl modified nucleoside
  modified_base (6)..(6): 2' fluoro-modified nucleoside
  modified_base (7)..(7): 2' O-methyl modified nucleoside
  modified_base (8)..(8): 2' fluoro-modified nucleoside
  modified_base (9)..(9): 2' O-methyl modified nucleoside
  modified_base (10)..(10): 2' fluoro-modified nucleoside
  modified_base (11)..(11): 2' O-methyl modified nucleoside
  modified_base (12)..(12): 2' O-methyl modified nucleoside
  modified_base (13)..(13): 2' O-methyl modified nucleoside
  modified_base (14)..(14): 2' fluoro-modified nucleoside
  modified_base (15)..(15): 2' O-methyl modified nucleoside
  modified_base (16)..(16): 2' fluoro-modified nucleoside
  modified_base (17)..(17): 2' O-methyl modified nucleoside
  modified_base (18)..(18): 2' fluoro-modified nucleoside
  modified_base (19)..(19): 2' O-methyl modified nucleoside
  misc_feature (19)..(20): Phosphorothioate linkage
  modified_base (20)..(20): 2' O-methyl modified nucleoside
  misc_feature (20)..(21): Phosphorothioate linkage
  modified_base (21)..(21): 2' O-methyl modified nucleoside
uugcuaugucagggaucuuuu

SEQ ID NO: 11314 - RNA, 21 nt, Artificial Sequence
  Description of Artificial Sequence: Synthetic oligonucleotide
  modified_base (1)..(1): 2' O-methyl modified nucleoside
  misc_feature (1)..(2): Phosphorothioate linkage
  modified_base (2)..(2): 2' fluoro-modified nucleoside
  misc_feature (2)..(3): Phosphorothioate linkage
  modified_base (3)..(3): 2' O-methyl modified nucleoside
  modified_base (4)..(4): 2' fluoro-modified nucleoside
  modified_base (5)..(5): 2' O-methyl modified nucleoside
  modified_base (6)..(6): 2' fluoro-modified nucleoside
  modified_base (7)..(7): 2' O-methyl modified nucleoside
  modified_base (8)..(8): 2' fluoro-modified nucleoside
  modified_base (9)..(9): 2' O-methyl modified nucleoside
  modified_base (10)..(10): 2' fluoro-modified nucleoside
  modified_base (11)..(11): 2' O-methyl modified nucleoside
  modified_base (12)..(12): 2' O-methyl modified nucleoside
  modified_base (13)..(13): 2' O-methyl modified nucleoside
  modified_base (14)..(14): 2' fluoro-modified nucleoside
  modified_base (15)..(15): 2' O-methyl modified nucleoside
  modified_base (16)..(16): 2' fluoro-modified nucleoside
  modified_base (17)..(17): 2' O-methyl modified nucleoside
  modified_base (18)..(18): 2' fluoro-modified nucleoside
  modified_base (19)..(19): 2' O-methyl modified nucleoside
  misc_feature (19)..(20): Phosphorothioate linkage
  modified_base (20)..(20): 2' O-methyl modified nucleoside
  misc_feature (20)..(21): Phosphorothioate linkage
  modified_base (21)..(21): 2' O-methyl modified nucleoside
ucugcuaugucagggaucuuu

SEQ ID NO: 11315 - RNA, 21 nt, Artificial Sequence
  Description of Artificial Sequence: Synthetic oligonucleotide
  modified_base (1)..(1): 2' O-methyl modified nucleoside
  misc_feature (1)..(2): Phosphorothioate linkage
  modified_base (2)..(2): 2' fluoro-modified nucleoside
  misc_feature (2)..(3): Phosphorothioate linkage
  modified_base (3)..(3): 2' O-methyl modified nucleoside
  modified_base (4)..(4): 2' fluoro-modified nucleoside
  modified_base (5)..(5): 2' O-methyl modified nucleoside
  modified_base (6)..(6): 2' fluoro-modified nucleoside
  modified_base (7)..(7): 2' O-methyl modified nucleoside
  modified_base (8)..(8): 2' fluoro-modified nucleoside
  modified_base (9)..(9): 2' O-methyl modified nucleoside
  modified_base (10)..(10): 2' fluoro-modified nucleoside
  modified_base (11)..(11): 2' O-methyl modified nucleoside
  modified_base (12)..(12): 2' O-methyl modified nucleoside
  modified_base (13)..(13): 2' O-methyl modified nucleoside
  modified_base (14)..(14): 2' fluoro-modified nucleoside
  modified_base (15)..(15): 2' O-methyl modified nucleoside
  modified_base (16)..(16): 2' fluoro-modified nucleoside
  modified_base (17)..(17): 2' O-methyl modified nucleoside
  modified_base (18)..(18): 2' fluoro-modified nucleoside
  modified_base (19)..(19): 2' O-methyl modified nucleoside
  misc_feature (19)..(20): Phosphorothioate linkage
  modified_base (20)..(20): 2' O-methyl modified nucleoside
  misc_feature (20)..(21): Phosphorothioate linkage
  modified_base (21)..(21): 2' O-methyl modified nucleoside
uuacugcuaugucagggauuu

SEQ ID NO: 11316 - RNA, 21 nt, Artificial Sequence
  Description of Artificial Sequence: Synthetic oligonucleotide
  modified_base (1)..(1): 2' O-methyl modified nucleoside
  misc_feature (1)..(2): Phosphorothioate linkage
  modified_base (2)..(2): 2' fluoro-modified nucleoside
  misc_feature (2)..(3): Phosphorothioate linkage
  modified_base (3)..(3): 2' O-methyl modified nucleoside
  modified_base (4)..(4): 2' fluoro-modified nucleoside
  modified_base (5)..(5): 2' O-methyl modified nucleoside
  modified_base (6)..(6): 2' fluoro-modified nucleoside
  modified_base (7)..(7): 2' O-methyl modified nucleoside
  modified_base (8)..(8): 2' fluoro-modified nucleoside
  modified_base (9)..(9): 2' O-methyl modified nucleoside
  modified_base (10)..(10): 2' fluoro-modified nucleoside
  modified_base (11)..(11): 2' O-methyl modified nucleoside
  modified_base (12)..(12): 2' O-methyl modified nucleoside
  modified_base (13)..(13): 2' O-methyl modified nucleoside
  modified_base (14)..(14): 2' fluoro-modified nucleoside
  modified_base (15)..(15): 2' O-methyl modified nucleoside
  modified_base (16)..(16): 2' fluoro-modified nucleoside
  modified_base (17)..(17): 2' O-methyl modified nucleoside
  modified_base (18)..(18): 2' fluoro-modified nucleoside
  modified_base (19)..(19): 2' O-methyl modified nucleoside
  misc_feature (19)..(20): Phosphorothioate linkage
  modified_base (20)..(20): 2' O-methyl modified nucleoside
  misc_feature (20)..(21): Phosphorothioate linkage
  modified_base (21)..(21): 2' O-methyl modified nucleoside
ugcuacugcuaugucaggguu

SEQ ID NO: 11317 - RNA, 21 nt, Artificial Sequence
  Description of Artificial Sequence: Synthetic oligonucleotide
  modified_base (1)..(1): 2' O-methyl modified nucleoside
  misc_feature (1)..(2): Phosphorothioate linkage
  modified_base (2)..(2): 2' fluoro-modified nucleoside
  misc_feature (2)..(3): Phosphorothioate linkage
  modified_base (3)..(3): 2' O-methyl modified nucleoside
  modified_base (4)..(4): 2' fluoro-modified nucleoside
  modified_base (5)..(5): 2' O-methyl modified nucleoside
  modified_base (6)..(6): 2' fluoro-modified nucleoside
  modified_base (7)..(7): 2' O-methyl modified nucleoside
  modified_base (8)..(8): 2' fluoro-modified nucleoside
  modified_base (9)..(9): 2' O-methyl modified nucleoside
  modified_base (10)..(10): 2' fluoro-modified nucleoside
  modified_base (11)..(11): 2' O-methyl modified nucleoside
  modified_base (12)..(12): 2' O-methyl modified nucleoside
  modified_base (13)..(13): 2' O-methyl modified nucleoside
  modified_base (14)..(14): 2' fluoro-modified nucleoside
  modified_base (15)..(15): 2' O-methyl modified nucleoside
  modified_base (16)..(16): 2' fluoro-modified nucleoside
  modified_base (17)..(17): 2' O-methyl modified nucleoside
  modified_base (18)..(18): 2' fluoro-modified nucleoside
  modified_base (19)..(19): 2' O-methyl modified nucleoside
  misc_feature (19)..(20): Phosphorothioate linkage
  modified_base (20)..(20): 2' O-methyl modified nucleoside
  misc_feature (20)..(21): Phosphorothioate linkage
  modified_base (21)..(21): 2' O-methyl modified nucleoside
uagcuacugcuaugucagguu

SEQ ID NO: 11318 - RNA, 21 nt, Artificial Sequence
  Description of Artificial Sequence: Synthetic oligonucleotide
  modified_base (1)..(1): 2' O-methyl modified nucleoside
  misc_feature (1)..(2): Phosphorothioate linkage
  modified_base (2)..(2): 2' fluoro-modified nucleoside
  misc_feature (2)..(3): Phosphorothioate linkage
  modified_base (3)..(3): 2' O-methyl modified nucleoside
  modified_base (4)..(4): 2' fluoro-modified nucleoside
  modified_base (5)..(5): 2' O-methyl modified nucleoside
  modified_base (6)..(6): 2' fluoro-modified nucleoside
  modified_base (7)..(7): 2' O-methyl modified nucleoside
  modified_base (8)..(8): 2' fluoro-modified nucleoside
  modified_base (9)..(9): 2' O-methyl modified nucleoside
  modified_base (10)..(10): 2' fluoro-modified nucleoside
  modified_base (11)..(11): 2' O-methyl modified nucleoside
  modified_base (12)..(12): 2' O-methyl modified nucleoside
  modified_base (13)..(13): 2' O-methyl modified nucleoside
  modified_base (14)..(14): 2' fluoro-modified nucleoside
  modified_base (15)..(15): 2' O-methyl modified nucleoside
  modified_base (16)..(16): 2' fluoro-modified nucleoside
  modified_base (17)..(17): 2' O-methyl modified nucleoside
  modified_base (18)..(18): 2' fluoro-modified nucleoside
  modified_base (19)..(19): 2' O-methyl modified nucleoside
  misc_feature (19)..(20): Phosphorothioate linkage
  modified_base (20)..(20): 2' O-methyl modified nucleoside
  misc_feature (20)..(21): Phosphorothioate linkage
  modified_base (21)..(21): 2' O-methyl modified nucleoside
ugacaagcuacugcuauguuu

SEQ ID NO: 11319 - RNA, 21 nt, Artificial Sequence
  Description of Artificial Sequence: Synthetic oligonucleotide
  modified_base (1)..(1): 2' O-methyl modified nucleoside
  misc_feature (1)..(2): Phosphorothioate linkage
  modified_base (2)..(2): 2' fluoro-modified nucleoside
  misc_feature (2)..(3): Phosphorothioate linkage
  modified_base (3)..(3): 2' O-methyl modified nucleoside
  modified_base (4)..(4): 2' fluoro-modified nucleoside
  modified_base (5)..(5): 2' O-methyl modified nucleoside
  modified_base (6)..(6): 2' fluoro-modified nucleoside
  modified_base (7)..(7): 2' O-methyl modified nucleoside
  modified_base (8)..(8): 2' fluoro-modified nucleoside
  modified_base (9)..(9): 2' O-methyl modified nucleoside
  modified_base (10)..(10): 2' fluoro-modified nucleoside
  modified_base (11)..(11): 2' O-methyl modified nucleoside
  modified_base (12)..(12): 2' O-methyl modified nucleoside
  modified_base (13)..(13): 2' O-methyl modified nucleoside
  modified_base (14)..(14): 2' fluoro-modified nucleoside
  modified_base (15)..(15): 2' O-methyl modified nucleoside
  modified_base (16)..(16): 2' fluoro-modified nucleoside
  modified_base (17)..(17): 2' O-methyl modified nucleoside
  modified_base (18)..(18): 2' fluoro-modified nucleoside
  modified_base (19)..(19): 2' O-methyl modified nucleoside
  misc_feature (19)..(20): Phosphorothioate linkage
  modified_base (20)..(20): 2' O-methyl modified nucleoside
  misc_feature (20)..(21): Phosphorothioate linkage
  modified_base (21)..(21): 2' O-methyl modified nucleoside
uagacaagcuacugcuauguu

SEQ ID NO: 11320 - RNA, 21 nt, Artificial Sequence
  Description of Artificial Sequence: Synthetic oligonucleotide
  modified_base (1)..(1): 2' O-methyl modified nucleoside
  misc_feature (1)..(2): Phosphorothioate linkage
  modified_base (2)..(2): 2' fluoro-modified nucleoside
  misc_feature (2)..(3): Phosphorothioate linkage
  modified_base (3)..(3): 2' O-methyl modified nucleoside
  modified_base (4)..(4): 2' fluoro-modified nucleoside
  modified_base (5)..(5): 2' O-methyl modified nucleoside
  modified_base (6)..(6): 2' fluoro-modified nucleoside
  modified_base (7)..(7): 2' O-methyl modified nucleoside
  modified_base (8)..(8): 2' fluoro-modified nucleoside
  modified_base (9)..(9): 2' O-methyl modified nucleoside
  modified_base (10)..(10): 2' fluoro-modified nucleoside
  modified_base (11)..(11): 2' O-methyl modified nucleoside
  modified_base (12)..(12): 2' O-methyl modified nucleoside
  modified_base (13)..(13): 2' O-methyl modified nucleoside
  modified_base (14)..(14): 2' fluoro-modified nucleoside
  modified_base (15)..(15): 2' O-methyl modified nucleoside
  modified_base (16)..(16): 2' fluoro-modified nucleoside
  modified_base (17)..(17): 2' O-methyl modified nucleoside
  modified_base (18)..(18): 2' fluoro-modified nucleoside
  modified_base (19)..(19): 2' O-methyl modified nucleoside
  misc_feature (19)..(20): Phosphorothioate linkage
  modified_base (20)..(20): 2' O-methyl modified nucleoside
  misc_feature (20)..(21): Phosphorothioate linkage
  modified_base (21)..(21): 2' O-methyl modified nucleoside
uaaaagacaagcuacugcuuu

SEQ ID NO: 11321 - RNA, 21 nt, Artificial Sequence
  Description of Artificial Sequence: Synthetic oligonucleotide
  modified_base (1)..(1): 2' O-methyl modified nucleoside
  misc_feature (1)..(2): Phosphorothioate linkage
  modified_base (2)..(2): 2' fluoro-modified nucleoside
  misc_feature (2)..(3): Phosphorothioate linkage
  modified_base (3)..(3): 2' O-methyl modified nucleoside
  modified_base (4)..(4): 2' fluoro-modified nucleoside
  modified_base (5)..(5): 2' O-methyl modified nucleoside
  modified_base (6)..(6): 2' fluoro-modified nucleoside
  modified_base (7)..(7): 2' O-methyl modified nucleoside
  modified_base (8)..(8): 2' fluoro-modified nucleoside
  modified_base (9)..(9): 2' O-methyl modified nucleoside
  modified_base (10)..(10): 2' fluoro-modified nucleoside
  modified_base (11)..(11): 2' O-methyl modified nucleoside
  modified_base (12)..(12): 2' O-methyl modified nucleoside
  modified_base (13)..(13): 2' O-methyl modified nucleoside
  modified_base (14)..(14): 2' fluoro-modified nucleoside
  modified_base (15)..(15): 2' O-methyl modified nucleoside
  modified_base (16)..(16): 2' fluoro-modified nucleoside
  modified_base (17)..(17): 2' O-methyl modified nucleoside
  modified_base (18)..(18): 2' fluoro-modified nucleoside
  modified_base (19)..(19): 2' O-methyl modified nucleoside
  misc_feature (19)..(20): Phosphorothioate linkage
  modified_base (20)..(20): 2' O-methyl modified nucleoside
  misc_feature (20)..(21): Phosphorothioate linkage
  modified_base (21)..(21): 2' O-methyl modified nucleoside
ugcaaagggauuuguguuuuu

SEQ ID NO: 11322 - RNA, 21 nt, Artificial Sequence
  Description of Artificial Sequence: Synthetic oligonucleotide
  modified_base (1)..(1): 2' O-methyl modified nucleoside
  misc_feature (1)..(2): Phosphorothioate linkage
  modified_base (2)..(2): 2' fluoro-modified nucleoside
  misc_feature (2)..(3): Phosphorothioate linkage
  modified_base (3)..(3): 2' O-methyl modified nucleoside
  modified_base (4)..(4): 2' fluoro-modified nucleoside
  modified_base (5)..(5): 2' O-methyl modified nucleoside
  modified_base (6)..(6): 2' fluoro-modified nucleoside
  modified_base (7)..(7): 2' O-methyl modified nucleoside
  modified_base (8)..(8): 2' fluoro-modified nucleoside
  modified_base (9)..(9): 2' O-methyl modified nucleoside
  modified_base (10)..(10): 2' fluoro-modified nucleoside
  modified_base (11)..(11): 2' O-methyl modified nucleoside
  modified_base (12)..(12): 2' O-methyl modified nucleoside
  modified_base (13)..(13): 2' O-methyl modified nucleoside
  modified_base (14)..(14): 2' fluoro-modified nucleoside
  modified_base (15)..(15): 2' O-methyl modified nucleoside
  modified_base (16)..(16): 2' fluoro-modified nucleoside
  modified_base (17)..(17): 2' O-methyl modified nucleoside
  modified_base (18)..(18): 2' fluoro-modified nucleoside
  modified_base (19)..(19): 2' O-methyl modified nucleoside
  misc_feature (19)..(20): Phosphorothioate linkage
  modified_base (20)..(20): 2' O-methyl modified nucleoside
  misc_feature (20)..(21): Phosphorothioate linkage
  modified_base (21)..(21): 2' O-methyl modified nucleoside
ucuaacacucaaaggccuauu

SEQ ID NO: 11323 - RNA, 21 nt, Artificial Sequence
  Description of Artificial Sequence: Synthetic oligonucleotide
  modified_base (1)..(1): 2' O-methyl modified nucleoside
  misc_feature (1)..(2): Phosphorothioate linkage
  modified_base (2)..(2): 2' fluoro-modified nucleoside
  misc_feature (2)..(3): Phosphorothioate linkage
  modified_base (3)..(3): 2' O-methyl modified nucleoside
  modified_base (4)..(4): 2' fluoro-modified nucleoside
  modified_base (5)..(5): 2' O-methyl modified nucleoside
  modified_base (6)..(6): 2' fluoro-modified nucleoside
  modified_base (7)..(7): 2' O-methyl modified nucleoside
  modified_base (8)..(8): 2' fluoro-modified nucleoside
  modified_base (9)..(9): 2' O-methyl modified nucleoside
  modified_base (10)..(10): 2' fluoro-modified nucleoside
  modified_base (11)..(11): 2' O-methyl modified nucleoside
  modified_base (12)..(12): 2' O-methyl modified nucleoside
  modified_base (13)..(13): 2' O-methyl modified nucleoside
  modified_base (14)..(14): 2' fluoro-modified nucleoside
  modified_base (15)..(15): 2' O-methyl modified nucleoside
  modified_base (16)..(16): 2' fluoro-modified nucleoside
  modified_base (17)..(17): 2' O-methyl modified nucleoside
  modified_base (18)..(18): 2' fluoro-modified nucleoside
  modified_base (19)..(19): 2' O-methyl modified nucleoside
  misc_feature (19)..(20): Phosphorothioate linkage
  modified_base (20)..(20): 2' O-methyl modified nucleoside
  misc_feature (20)..(21): Phosphorothioate linkage
  modified_base (21)..(21): 2' O-methyl modified nucleoside
uucuaacacucaaaggccuuu

SEQ ID NO: 11324 - RNA, 21 nt, Artificial Sequence
  Description of Artificial Sequence: Synthetic oligonucleotide
  modified_base (1)..(1): 2' O-methyl modified nucleoside
  misc_feature (1)..(2): Phosphorothioate linkage
  modified_base (2)..(2): 2' fluoro-modified nucleoside
  misc_feature (2)..(3): Phosphorothioate linkage
  modified_base (3)..(3): 2' O-methyl modified nucleoside
  modified_base (4)..(4): 2' fluoro-modified nucleoside
  modified_base (5)..(5): 2' O-methyl modified nucleoside
  modified_base (6)..(6): 2' fluoro-modified nucleoside
  modified_base (7)..(7): 2' O-methyl modified nucleoside
  modified_base (8)..(8): 2' fluoro-modified nucleoside
  modified_base (9)..(9): 2' O-methyl modified nucleoside
  modified_base (10)..(10): 2' fluoro-modified nucleoside
  modified_base (11)..(11): 2' O-methyl modified nucleoside
  modified_base (12)..(12): 2' O-methyl modified nucleoside
  modified_base (13)..(13): 2' O-methyl modified nucleoside
  modified_base (14)..(14): 2' fluoro-modified nucleoside
  modified_base (15)..(15): 2' O-methyl modified nucleoside
  modified_base (16)..(16): 2' fluoro-modified nucleoside
  modified_base (17)..(17): 2' O-methyl modified nucleoside
  modified_base (18)..(18): 2' fluoro-modified nucleoside
  modified_base (19)..(19): 2' O-methyl modified nucleoside
  misc_feature (19)..(20): Phosphorothioate linkage
  modified_base (20)..(20): 2' O-methyl modified nucleoside
  misc_feature (20)..(21): Phosphorothioate linkage
  modified_base (21)..(21): 2' O-methyl modified nucleoside
uguagacucaagauaauuuuu

SEQ ID NO: 11325 - RNA, 21 nt, Artificial Sequence
  Description of Artificial Sequence: Synthetic oligonucleotide
  modified_base (1)..(1): 2' O-methyl modified nucleoside
  misc_feature (1)..(2): Phosphorothioate linkage
  modified_base (2)..(2): 2' fluoro-modified nucleoside
  misc_feature (2)..(3): Phosphorothioate linkage
  modified_base (3)..(3): 2' O-methyl modified nucleoside
  modified_base (4)..(4): 2' fluoro-modified nucleoside
  modified_base (5)..(5): 2' O-methyl modified nucleoside
  modified_base (6)..(6): 2' fluoro-modified nucleoside
  modified_base (7)..(7): 2' O-methyl modified nucleoside
  modified_base (8)..(8): 2' fluoro-modified nucleoside
  modified_base (9)..(9): 2' O-methyl modified nucleoside
  modified_base (10)..(10): 2' fluoro-modified nucleoside
  modified_base (11)..(11): 2' O-methyl modified nucleoside
  modified_base (12)..(12): 2' O-methyl modified nucleoside
  modified_base (13)..(13): 2' O-methyl modified nucleoside
  modified_base (14)..(14): 2' fluoro-modified nucleoside
  modified_base (15)..(15): 2' O-methyl modified nucleoside
  modified_base (16)..(16): 2' fluoro-modified nucleoside
  modified_base (17)..(17): 2' O-methyl modified nucleoside
  modified_base (18)..(18): 2' fluoro-modified nucleoside
  modified_base (19)..(19): 2' O-methyl modified nucleoside
  misc_feature (19)..(20): Phosphorothioate linkage
  modified_base (20)..(20): 2' O-methyl modified nucleoside
  misc_feature (20)..(21): Phosphorothioate linkage
  modified_base (21)..(21): 2' O-methyl modified nucleoside
uuguagacucaagauaauuuu

SEQ ID NO: 11326 - RNA, 21 nt, Artificial Sequence
  Description of Artificial Sequence: Synthetic oligonucleotide
  modified_base (1)..(1): 2' O-methyl modified nucleoside
  misc_feature (1)..(2): Phosphorothioate linkage
  modified_base (2)..(2): 2' fluoro-modified nucleoside
  misc_feature (2)..(3): Phosphorothioate linkage
  modified_base (3)..(3): 2' O-methyl modified nucleoside
  modified_base (4)..(4): 2' fluoro-modified nucleoside
  modified_base (5)..(5): 2' O-methyl modified nucleoside
  modified_base (6)..(6): 2' fluoro-modified nucleoside
  modified_base (7)..(7): 2' O-methyl modified nucleoside
  modified_base (8)..(8): 2' fluoro-modified nucleoside
  modified_base (9)..(9): 2' O-methyl modified nucleoside
  modified_base (10)..(10): 2' fluoro-modified nucleoside
  modified_base (11)..(11): 2' O-methyl modified nucleoside
  modified_base (12)..(12): 2' O-methyl modified nucleoside
  modified_base (13)..(13): 2' O-methyl modified nucleoside
  modified_base (14)..(14): 2' fluoro-modified nucleoside
  modified_base (15)..(15): 2' O-methyl modified nucleoside
  modified_base (16)..(16): 2' fluoro-modified nucleoside
  modified_base (17)..(17): 2' O-methyl modified nucleoside
  modified_base (18)..(18): 2' fluoro-modified nucleoside
  modified_base (19)..(19): 2' O-methyl modified nucleoside
  misc_feature (19)..(20): Phosphorothioate linkage
  modified_base (20)..(20): 2' O-methyl modified nucleoside
  misc_feature (20)..(21): Phosphorothioate linkage
  modified_base (21)..(21): 2' O-methyl modified nucleoside
ucgaacaauuuuuguguuuuu

SEQ ID NO: 11327 - RNA, 21 nt, Artificial Sequence
  Description of Artificial Sequence: Synthetic oligonucleotide
  modified_base (1)..(1): 2' O-methyl modified nucleoside
  misc_feature (1)..(2): Phosphorothioate linkage
  modified_base (2)..(2): 2' fluoro-modified nucleoside
  misc_feature (2)..(3): Phosphorothioate linkage
  modified_base (3)..(3): 2' O-methyl modified nucleoside
  modified_base (4)..(4): 2' fluoro-modified nucleoside
  modified_base (5)..(5): 2' O-methyl modified nucleoside
  modified_base (6)..(6): 2' fluoro-modified nucleoside
  modified_base (7)..(7): 2' O-methyl modified nucleoside
  modified_base (8)..(8): 2' fluoro-modified nucleoside
  modified_base (9)..(9): 2' O-methyl modified nucleoside
  modified_base (10)..(10): 2' fluoro-modified nucleoside
  modified_base (11)..(11): 2' O-methyl modified nucleoside
  modified_base (12)..(12): 2' O-methyl modified nucleoside
  modified_base (13)..(13): 2' O-methyl modified nucleoside
  modified_base (14)..(14): 2' fluoro-modified nucleoside
  modified_base (15)..(15): 2' O-methyl modified nucleoside
  modified_base (16)..(16): 2' fluoro-modified nucleoside
  modified_base (17)..(17): 2' O-methyl modified nucleoside
  modified_base (18)..(18): 2' fluoro-modified nucleoside
  modified_base (19)..(19): 2' O-methyl modified nucleoside
  misc_feature (19)..(20): Phosphorothioate linkage
  modified_base (20)..(20): 2' O-methyl modified nucleoside
  misc_feature (20)..(21): Phosphorothioate linkage
  modified_base (21)..(21): 2' O-methyl modified nucleoside
ugccgaacaauuuuuguguuu

SEQ ID NO: 11328 - RNA, 21 nt, Artificial Sequence
  Description of Artificial Sequence: Synthetic oligonucleotide
  modified_base (1)..(1): 2' O-methyl modified nucleoside
  misc_feature (1)..(2): Phosphorothioate linkage
  modified_base (2)..(2): 2' fluoro-modified nucleoside
  misc_feature (2)..(3): Phosphorothioate linkage
  modified_base (3)..(3): 2' O-methyl modified nucleoside
  modified_base (4)..(4): 2' fluoro-modified nucleoside
  modified_base (5)..(5): 2' O-methyl modified nucleoside
  modified_base (6)..(6): 2' fluoro-modified nucleoside
  modified_base (7)..(7): 2' O-methyl modified nucleoside
  modified_base (8)..(8): 2' fluoro-modified nucleoside
  modified_base (9)..(9): 2' O-methyl modified nucleoside
  modified_base (10)..(10): 2' fluoro-modified nucleoside
  modified_base (11)..(11): 2' O-methyl modified nucleoside
  modified_base (12)..(12): 2' O-methyl modified nucleoside
  modified_base (13)..(13): 2' O-methyl modified nucleoside
  modified_base (14)..(14): 2' fluoro-modified nucleoside
  modified_base (15)..(15): 2' O-methyl modified nucleoside
  modified_base (16)..(16): 2' fluoro-modified nucleoside
  modified_base (17)..(17): 2' O-methyl modified nucleoside
  modified_base (18)..(18): 2' fluoro-modified nucleoside
  modified_base (19)..(19): 2' O-methyl modified nucleoside
  misc_feature (19)..(20): Phosphorothioate linkage
  modified_base (20)..(20): 2' O-methyl modified nucleoside
  misc_feature (20)..(21): Phosphorothioate linkage
  modified_base (21)..(21): 2' O-methyl modified nucleoside
uagccgaacaauuuuuguguu

SEQ ID NO: 11329 - RNA, 21 nt, Artificial Sequence
  Description of Artificial Sequence: Synthetic oligonucleotide
  modified_base (1)..(1): 2' O-methyl modified nucleoside
  misc_feature (1)..(2): Phosphorothioate linkage
  modified_base (2)..(2): 2' fluoro-modified nucleoside
  misc_feature (2)..(3): Phosphorothioate linkage
  modified_base (3)..(3): 2' O-methyl modified nucleoside
  modified_base (4)..(4): 2' fluoro-modified nucleoside
  modified_base (5)..(5): 2' O-methyl modified nucleoside
  modified_base (6)..(6): 2' fluoro-modified nucleoside
  modified_base (7)..(7): 2' O-methyl modified nucleoside
  modified_base (8)..(8): 2' fluoro-modified nucleoside
  modified_base (9)..(9): 2' O-methyl modified nucleoside
  modified_base (10)..(10): 2' fluoro-modified nucleoside
  modified_base (11)..(11): 2' O-methyl modified nucleoside
  modified_base (12)..(12): 2' O-methyl modified nucleoside
  modified_base (13)..(13): 2' O-methyl modified nucleoside
  modified_base (14)..(14): 2' fluoro-modified nucleoside
  modified_base (15)..(15): 2' O-methyl modified nucleoside
  modified_base (16)..(16): 2' fluoro-modified nucleoside
  modified_base (17)..(17): 2' O-methyl modified nucleoside
  modified_base (18)..(18): 2' fluoro-modified nucleoside
  modified_base (19)..(19): 2' O-methyl modified nucleoside
  misc_feature (19)..(20): Phosphorothioate linkage
  modified_base (20)..(20): 2' O-methyl modified nucleoside
  misc_feature (20)..(21): Phosphorothioate linkage
  modified_base (21)..(21): 2' O-methyl modified nucleoside
ucagccgaacaauuuuuguuu

SEQ ID NO: 11330 - RNA, 21 nt, Artificial Sequence
  Description of Artificial Sequence: Synthetic oligonucleotide
  modified_base (1)..(1): 2' O-methyl modified nucleoside
  misc_feature (1)..(2): Phosphorothioate linkage
  modified_base (2)..(2): 2' fluoro-modified nucleoside
  misc_feature (2)..(3): Phosphorothioate linkage
  modified_base (3)..(3): 2' O-methyl modified nucleoside
  modified_base (4)..(4): 2' fluoro-modified nucleoside
  modified_base (5)..(5): 2' O-methyl modified nucleoside
  modified_base (6)..(6): 2' fluoro-modified nucleoside
  modified_base (7)..(7): 2' O-methyl modified nucleoside
  modified_base (8)..(8): 2' fluoro-modified nucleoside
  modified_base (9)..(9): 2' O-methyl modified nucleoside
  modified_base (10)..(10): 2' fluoro-modified nucleoside
  modified_base (11)..(11): 2' O-methyl modified nucleoside
  modified_base (12)..(12): 2' O-methyl modified nucleoside
  modified_base (13)..(13): 2' O-methyl modified nucleoside
  modified_base (14)..(14): 2' fluoro-modified nucleoside
  modified_base (15)..(15): 2' O-methyl modified nucleoside
  modified_base (16)..(16): 2' fluoro-modified nucleoside
  modified_base (17)..(17): 2' O-methyl modified nucleoside
  modified_base (18)..(18): 2' fluoro-modified nucleoside
  modified_base (19)..(19): 2' O-methyl modified nucleoside
  misc_feature (19)..(20): Phosphorothioate linkage
  modified_base (20)..(20): 2' O-methyl modified nucleoside
  misc_feature (20)..(21): Phosphorothioate linkage
  modified_base (21)..(21): 2' O-methyl modified nucleoside
uuaaggcaguuuugugccguu

SEQ ID NO: 11331 - RNA, 21 nt, Artificial Sequence
  Description of Artificial Sequence: Synthetic oligonucleotide
  modified_base (1)..(1): 2' O-methyl modified nucleoside
  misc_feature (1)..(2): Phosphorothioate linkage
  modified_base (2)..(2): 2' fluoro-modified nucleoside
  misc_feature (2)..(3): Phosphorothioate linkage
  modified_base (3)..(3): 2' O-methyl modified nucleoside
  modified_base (4)..(4): 2' fluoro-modified nucleoside
  modified_base (5)..(5): 2' O-methyl modified nucleoside
  modified_base (6)..(6): 2' fluoro-modified nucleoside
  modified_base (7)..(7): 2' O-methyl modified nucleoside
  modified_base (8)..(8): 2' fluoro-modified nucleoside
  modified_base (9)..(9): 2' O-methyl modified nucleoside
  modified_base (10)..(10): 2' fluoro-modified nucleoside
  modified_base (11)..(11): 2' O-methyl modified nucleoside
  modified_base (12)..(12): 2' O-methyl modified nucleoside
  modified_base (13)..(13): 2' O-methyl modified nucleoside
  modified_base (14)..(14): 2' fluoro-modified nucleoside
  modified_base (15)..(15): 2' O-methyl modified nucleoside
  modified_base (16)..(16): 2' fluoro-modified nucleoside
  modified_base (17)..(17): 2' O-methyl modified nucleoside
  modified_base (18)..(18): 2' fluoro-modified nucleoside
  modified_base (19)..(19): 2' O-methyl modified nucleoside
  misc_feature (19)..(20): Phosphorothioate linkage
  modified_base (20)..(20): 2' O-methyl modified nucleoside
  misc_feature (20)..(21): Phosphorothioate linkage
  modified_base (21)..(21): 2' O-methyl modified nucleoside
uauaacaccaucuaccuucuu

SEQ ID NO: 11332 - RNA, 21 nt, Artificial Sequence
  Description of Artificial Sequence: Synthetic oligonucleotide
  modified_base (1)..(1): 2' O-methyl modified nucleoside
  misc_feature (1)..(2): Phosphorothioate linkage
  modified_base (2)..(2): 2' fluoro-modified nucleoside
  misc_feature (2)..(3): Phosphorothioate linkage
  modified_base (3)..(3): 2' O-methyl modified nucleoside
  modified_base (4)..(4): 2' fluoro-modified nucleoside
  modified_base (5)..(5): 2' O-methyl modified nucleoside
  modified_base (6)..(6): 2' fluoro-modified nucleoside
  modified_base (7)..(7): 2' O-methyl modified nucleoside
  modified_base (8)..(8): 2' fluoro-modified nucleoside
  modified_base (9)..(9): 2' O-methyl modified nucleoside
  modified_base (10)..(10): 2' fluoro-modified nucleoside
  modified_base (11)..(11): 2' O-methyl modified nucleoside
  modified_base (12)..(12): 2' O-methyl modified nucleoside
  modified_base (13)..(13): 2' O-methyl modified nucleoside
  modified_base (14)..(14): 2' fluoro-modified nucleoside
  modified_base (15)..(15): 2' O-methyl modified nucleoside
  modified_base (16)..(16): 2' fluoro-modified nucleoside
  modified_base (17)..(17): 2' O-methyl modified nucleoside
  modified_base (18)..(18): 2' fluoro-modified nucleoside
  modified_base (19)..(19): 2' O-methyl modified nucleoside
  misc_feature (19)..(20): Phosphorothioate linkage
  modified_base (20)..(20): 2' O-methyl modified nucleoside
  misc_feature (20)..(21): Phosphorothioate linkage
  modified_base (21)..(21): 2' O-methyl modified nucleoside
uaacuauaacaccaucuacuu

SEQ ID NO: 11333 - RNA, 21 nt, Artificial Sequence
  Description of Artificial Sequence: Synthetic oligonucleotide
  modified_base (1)..(1): 2' fluoro-modified nucleoside
  misc_feature (1)..(2): Phosphorothioate linkage
  modified_base (2)..(2): 2' O-methyl modified nucleoside
  misc_feature (2)..(3): Phosphorothioate linkage
  modified_base (3)..(3): 2' fluoro-modified nucleoside
  modified_base (4)..(4): 2' O-methyl modified nucleoside
  modified_base (5)..(5): 2' fluoro-modified nucleoside
  modified_base (6)..(6): 2' O-methyl modified nucleoside
  modified_base (7)..(7): 2' fluoro-modified nucleoside
  modified_base (8)..(8): 2' fluoro-modified nucleoside
  modified_base (9)..(9): 2' fluoro-modified nucleoside
  modified_base (10)..(10): 2' O-methyl modified nucleoside
  modified_base (11)..(11): 2' fluoro-modified nucleoside
  modified_base (12)..(12): 2' O-methyl modified nucleoside
  modified_base (13)..(13): 2' fluoro-modified nucleoside
  modified_base (14)..(14): 2' O-methyl modified nucleoside
  modified_base (15)..(15): 2' fluoro-modified nucleoside
  modified_base (16)..(16): 2' O-methyl modified nucleoside
  modified_base (17)..(17): 2' fluoro-modified nucleoside
  modified_base (18)..(18): 2' O-methyl modified nucleoside
  modified_base (19)..(19): 2' fluoro-modified nucleoside
  misc_feature (19)..(20): Phosphorothioate linkage
  modified_base (20)..(20): 2' O-methyl modified nucleoside
  misc_feature (20)..(21): Phosphorothioate linkage
  modified_base (21)..(21): 2' O-methyl modified nucleoside
uggaccaucauccagagaauu

SEQ ID NO: 11334 - RNA, 21 nt, Artificial Sequence
  Description of Artificial Sequence: Synthetic oligonucleotide
  modified_base (1)..(1): 2' fluoro-modified nucleoside
  misc_feature (1)..(2): Phosphorothioate linkage
  modified_base (2)..(2): 2' O-methyl modified nucleoside
  misc_feature (2)..(3): Phosphorothioate linkage
  modified_base (3)..(3): 2' fluoro-modified nucleoside
  modified_base (4)..(4): 2' O-methyl modified nucleoside
  modified_base (5)..(5): 2' fluoro-modified nucleoside
  modified_base (6)..(6): 2' O-methyl modified nucleoside
  modified_base (7)..(7): 2' fluoro-modified nucleoside
  modified_base (8)..(8): 2' fluoro-modified nucleoside
  modified_base (9)..(9): 2' fluoro-modified nucleoside
  modified_base (10)..(10): 2' O-methyl modified nucleoside
  modified_base (11)..(11): 2' fluoro-modified nucleoside
  modified_base (12)..(12): 2' O-methyl modified nucleoside
  modified_base (13)..(13): 2' fluoro-modified nucleoside
  modified_base (14)..(14): 2' O-methyl modified nucleoside
  modified_base (15)..(15): 2' fluoro-modified nucleoside
  modified_base (16)..(16): 2' O-methyl modified nucleoside
  modified_base (17)..(17): 2' fluoro-modified nucleoside
  modified_base (18)..(18): 2' O-methyl modified nucleoside
  modified_base (19)..(19): 2' fluoro-modified nucleoside
  misc_feature (19)..(20): Phosphorothioate linkage
  modified_base (20)..(20): 2' O-methyl modified nucleoside
  misc_feature (20)..(21): Phosphorothioate linkage
  modified_base (21)..(21): 2' O-methyl modified nucleoside
ggaccaucauccagagacauu

SEQ ID NO: 11335 - RNA, 21 nt, Artificial Sequence
  Description of Artificial Sequence: Synthetic oligonucleotide
  modified_base (1)..(1): 2' fluoro-modified nucleoside
  misc_feature (1)..(2): Phosphorothioate linkage
  modified_base (2)..(2): 2' O-methyl modified nucleoside
  misc_feature (2)..(3): Phosphorothioate linkage
  modified_base (3)..(3): 2' fluoro-modified nucleoside
  modified_base (4)..(4): 2' O-methyl modified nucleoside
  modified_base (5)..(5): 2' fluoro-modified nucleoside
  modified_base (6)..(6): 2' O-methyl modified nucleoside
  modified_base (7)..(7): 2' fluoro-modified nucleoside
  modified_base (8)..(8): 2' fluoro-modified nucleoside
  modified_base (9)..(9): 2' fluoro-modified nucleoside
  modified_base (10)..(10): 2' O-methyl modified nucleoside
  modified_base (11)..(11): 2' fluoro-modified nucleoside
  modified_base (12)..(12): 2' O-methyl modified nucleoside
  modified_base (13)..(13): 2' fluoro-modified nucleoside
  modified_base (14)..(14): 2' O-methyl modified nucleoside
  modified_base (15)..(15): 2' fluoro-modified nucleoside
  modified_base (16)..(16): 2' O-methyl modified nucleoside
  modified_base (17)..(17): 2' fluoro-modified nucleoside
  modified_base (18)..(18): 2' O-methyl modified nucleoside
  modified_base (19)..(19): 2' fluoro-modified nucleoside
  misc_feature (19)..(20): Phosphorothioate linkage
  modified_base (20)..(20): 2' O-methyl modified nucleoside
  misc_feature (20)..(21): Phosphorothioate linkage
  modified_base (21)..(21): 2' O-methyl modified nucleoside
cgccucuuccuggggaacauu

SEQ ID NO: 11336 - RNA, 21 nt, Artificial Sequence
  Description of Artificial Sequence: Synthetic oligonucleotide
  modified_base (1)..(1): 2' fluoro-modified nucleoside
  misc_feature (1)..(2): Phosphorothioate linkage
  modified_base (2)..(2): 2' O-methyl modified nucleoside
  misc_feature (2)..(3): Phosphorothioate linkage
  modified_base (3)..(3): 2' fluoro-modified nucleoside
  modified_base (4)..(4): 2' O-methyl modified nucleoside
  modified_base (5)..(5): 2' fluoro-modified nucleoside
  modified_base (6)..(6): 2' O-methyl modified nucleoside
  modified_base (7)..(7): 2' fluoro-modified nucleoside
  modified_base (8)..(8): 2' fluoro-modified nucleoside
  modified_base (9)..(9): 2' fluoro-modified nucleoside
  modified_base (10)..(10): 2' O-methyl modified nucleoside
  modified_base (11)..(11): 2' fluoro-modified nucleoside
  modified_base (12)..(12): 2' O-methyl modified nucleoside
  modified_base (13)..(13): 2' fluoro-modified nucleoside
  modified_base (14)..(14): 2' O-methyl modified nucleoside
  modified_base (15)..(15): 2' fluoro-modified nucleoside
  modified_base (16)..(16): 2' O-methyl modified nucleoside
  modified_base (17)..(17): 2' fluoro-modified nucleoside
  modified_base (18)..(18): 2' O-methyl modified nucleoside
  modified_base (19)..(19): 2' fluoro-modified nucleoside
  misc_feature (19)..(20): Phosphorothioate linkage
  modified_base (20)..(20): 2' O-methyl modified nucleoside
  misc_feature (20)..(21): Phosphorothioate linkage
  modified_base (21)..(21): 2' O-methyl modified nucleoside
gacaacugcuuggacaagauu

SEQ ID NO: 11337 - RNA, 21 nt, Artificial Sequence
  Description of Artificial Sequence: Synthetic oligonucleotide
  modified_base (1)..(1): 2' fluoro-modified nucleoside
  misc_feature (1)..(2): Phosphorothioate linkage
  modified_base (2)..(2): 2' O-methyl modified nucleoside
  misc_feature (2)..(3): Phosphorothioate linkage
  modified_base (3)..(3): 2' fluoro-modified nucleoside
  modified_base (4)..(4): 2' O-methyl modified nucleoside
  modified_base (5)..(5): 2' fluoro-modified nucleoside
  modified_base (6)..(6): 2' O-methyl modified nucleoside
  modified_base (7)..(7): 2' fluoro-modified nucleoside
  modified_base (8)..(8): 2' fluoro-modified nucleoside
  modified_base (9)..(9): 2' fluoro-modified nucleoside
  modified_base (10)..(10): 2' O-methyl modified nucleoside
  modified_base (11)..(11): 2' fluoro-modified nucleoside
  modified_base (12)..(12): 2' O-methyl modified nucleoside
  modified_base (13)..(13): 2' fluoro-modified nucleoside
  modified_base (14)..(14): 2' O-methyl modified nucleoside
  modified_base (15)..(15): 2' fluoro-modified nucleoside
  modified_base (16)..(16): 2' O-methyl modified nucleoside
  modified_base (17)..(17): 2' fluoro-modified nucleoside
  modified_base (18)..(18): 2' O-methyl modified nucleoside
  modified_base (19)..(19): 2' fluoro-modified nucleoside
  misc_feature (19)..(20): Phosphorothioate linkage
  modified_base (20)..(20): 2' O-methyl modified nucleoside
  misc_feature (20)..(21): Phosphorothioate linkage
  modified_base (21)..(21): 2' O-methyl modified nucleoside
acaacugcuuggacaaguauu

SEQ ID NO: 11338 - RNA, 21 nt, Artificial Sequence
  Description of Artificial Sequence: Synthetic oligonucleotide
  modified_base (1)..(1): 2' fluoro-modified nucleoside
  misc_feature (1)..(2): Phosphorothioate linkage
  modified_base (2)..(2): 2' O-methyl modified nucleoside
  misc_feature (2)..(3): Phosphorothioate linkage
  modified_base (3)..(3): 2' fluoro-modified nucleoside
  modified_base (4)..(4): 2' O-methyl modified nucleoside
  modified_base (5)..(5): 2' fluoro-modified nucleoside
  modified_base (6)..(6): 2' O-methyl modified nucleoside
  modified_base (7)..(7): 2' fluoro-modified nucleoside
  modified_base (8)..(8): 2' fluoro-modified nucleoside
  modified_base (9)..(9): 2' fluoro-modified nucleoside
  modified_base (10)..(10): 2' O-methyl modified nucleoside
  modified_base (11)..(11): 2' fluoro-modified nucleoside
  modified_base (12)..(12): 2' O-methyl modified nucleoside
  modified_base (13)..(13): 2' fluoro-modified nucleoside
  modified_base (14)..(14): 2' O-methyl modified nucleoside
  modified_base (15)..(15): 2' fluoro-modified nucleoside
  modified_base (16)..(16): 2' O-methyl modified nucleoside
  modified_base (17)..(17): 2' fluoro-modified nucleoside
  modified_base (18)..(18): 2' O-methyl modified nucleoside
  modified_base (19)..(19): 2' fluoro-modified nucleoside
  misc_feature (19)..(20): Phosphorothioate linkage
  modified_base (20)..(20): 2' O-methyl modified nucleoside
  misc_feature (20)..(21): Phosphorothioate linkage
  modified_base (21)..(21): 2' O-methyl modified nucleoside
aagguggcuacugguacaauu

SEQ ID NO: 11339 - RNA, 21 nt, Artificial Sequence
  Description of Artificial Sequence: Synthetic oligonucleotide
  modified_base (1)..(1): 2' fluoro-modified nucleoside
  misc_feature (1)..(2): Phosphorothioate linkage
  modified_base (2)..(2): 2' O-methyl modified nucleoside
  misc_feature (2)..(3): Phosphorothioate linkage
  modified_base (3)..(3): 2' fluoro-modified nucleoside
  modified_base (4)..(4): 2' O-methyl modified nucleoside
  modified_base (5)..(5): 2' fluoro-modified nucleoside
  modified_base (6)..(6): 2' O-methyl modified nucleoside
  modified_base (7)..(7): 2' fluoro-modified nucleoside
  modified_base (8)..(8): 2' fluoro-modified nucleoside
  modified_base (9)..(9): 2' fluoro-modified nucleoside
  modified_base (10)..(10): 2' O-methyl modified nucleoside
  modified_base (11)..(11): 2' fluoro-modified nucleoside
  modified_base (12)..(12): 2' O-methyl modified nucleoside
  modified_base (13)..(13): 2' fluoro-modified nucleoside
  modified_base (14)..(14): 2' O-methyl modified nucleoside
  modified_base (15)..(15): 2' fluoro-modified nucleoside
  modified_base (16)..(16): 2' O-methyl modified nucleoside
  modified_base (17)..(17): 2' fluoro-modified nucleoside
  modified_base (18)..(18): 2' O-methyl modified nucleoside
  modified_base (19)..(19): 2' fluoro-modified nucleoside
  misc_feature (19)..(20): Phosphorothioate linkage
  modified_base (20)..(20): 2' O-methyl modified nucleoside
  misc_feature (20)..(21): Phosphorothioate linkage
  modified_base (21)..(21): 2' O-methyl modified nucleoside
agguggcuacugguacaaauu

SEQ ID NO: 11340 - RNA, 21 nt, Artificial Sequence
  Description of Artificial Sequence: Synthetic oligonucleotide
  modified_base (1)..(1): 2' fluoro-modified nucleoside
  misc_feature (1)..(2): Phosphorothioate linkage
  modified_base (2)..(2): 2' O-methyl modified nucleoside
  misc_feature (2)..(3): Phosphorothioate linkage
  modified_base (3)..(3): 2' fluoro-modified nucleoside
  modified_base (4)..(4): 2' O-methyl modified nucleoside
  modified_base (5)..(5): 2' fluoro-modified nucleoside
  modified_base (6)..(6): 2' O-methyl modified nucleoside
  modified_base (7)..(7): 2' fluoro-modified nucleoside
  modified_base (8)..(8): 2' fluoro-modified nucleoside
  modified_base (9)..(9): 2' fluoro-modified nucleoside
  modified_base (10)..(10): 2' O-methyl modified nucleoside
  modified_base (11)..(11): 2' fluoro-modified nucleoside
  modified_base (12)..(12): 2' O-methyl modified nucleoside
  modified_base (13)..(13): 2' fluoro-modified nucleoside
  modified_base (14)..(14): 2' O-methyl modified nucleoside
  modified_base (15)..(15): 2' fluoro-modified nucleoside
  modified_base (16)..(16): 2' O-methyl modified nucleoside
  modified_base (17)..(17): 2' fluoro-modified nucleoside
  modified_base (18)..(18): 2' O-methyl modified nucleoside
  modified_base (19)..(19): 2' fluoro-modified nucleoside
  misc_feature (19)..(20): Phosphorothioate linkage
  modified_base (20)..(20): 2' O-methyl modified nucleoside
  misc_feature (20)..(21): Phosphorothioate linkage
  modified_base (21)..(21): 2' O-methyl modified nucleoside
guggcuacugguacaacuauu

SEQ ID NO: 11341 - RNA, 21 nt, Artificial Sequence
  Description of Artificial Sequence: Synthetic oligonucleotide
  modified_base (1)..(1): 2' fluoro-modified nucleoside
  misc_feature (1)..(2): Phosphorothioate linkage
  modified_base (2)..(2): 2' O-methyl modified nucleoside
  misc_feature (2)..(3): Phosphorothioate linkage
  modified_base (3)..(3): 2' fluoro-modified nucleoside
  modified_base (4)..(4): 2' O-methyl modified nucleoside
  modified_base (5)..(5): 2' fluoro-modified nucleoside
  modified_base (6)..(6): 2' O-methyl modified nucleoside
  modified_base (7)..(7): 2' fluoro-modified nucleoside
  modified_base (8)..(8): 2' fluoro-modified nucleoside
  modified_base (9)..(9): 2' fluoro-modified nucleoside
  modified_base (10)..(10): 2' O-methyl modified nucleoside
  modified_base (11)..(11): 2' fluoro-modified nucleoside
  modified_base (12)..(12): 2' O-methyl modified nucleoside
  modified_base (13)..(13): 2' fluoro-modified nucleoside
  modified_base (14)..(14): 2' O-methyl modified nucleoside
  modified_base (15)..(15): 2' fluoro-modified nucleoside
  modified_base (16)..(16): 2' O-methyl modified nucleoside
  modified_base (17)..(17): 2' fluoro-modified nucleoside
  modified_base (18)..(18): 2' O-methyl modified nucleoside
  modified_base (19)..(19): 2' fluoro-modified nucleoside
  misc_feature (19)..(20): Phosphorothioate linkage
  modified_base (20)..(20): 2' O-methyl modified nucleoside
  misc_feature (20)..(21): Phosphorothioate linkage
  modified_base (21)..(21): 2' O-methyl modified nucleoside
uggcuacugguacaacugauu

SEQ ID NO: 11342 - RNA, 21 nt, Artificial Sequence
  Description of Artificial Sequence: Synthetic oligonucleotide
  modified_base (1)..(1): 2' fluoro-modified nucleoside
  misc_feature (1)..(2): Phosphorothioate linkage
  modified_base (2)..(2): 2' O-methyl modified nucleoside
  misc_feature (2)..(3): Phosphorothioate linkage
  modified_base (3)..(3): 2' fluoro-modified nucleoside
  modified_base (4)..(4): 2' O-methyl modified nucleoside
  modified_base (5)..(5): 2' fluoro-modified nucleoside
  modified_base (6)..(6): 2' O-methyl modified nucleoside
  modified_base (7)..(7): 2' fluoro-modified nucleoside
  modified_base (8)..(8): 2' fluoro-modified nucleoside
  modified_base (9)..(9): 2' fluoro-modified nucleoside
  modified_base (10)..(10): 2' O-methyl modified nucleoside
  modified_base (11)..(11): 2' fluoro-modified nucleoside
  modified_base (12)..(12): 2' O-methyl modified nucleoside
  modified_base (13)..(13): 2' fluoro-modified nucleoside
  modified_base (14)..(14): 2' O-methyl modified nucleoside
  modified_base (15)..(15): 2' fluoro-modified nucleoside
  modified_base (16)..(16): 2' O-methyl modified nucleoside
  modified_base (17)..(17): 2' fluoro-modified nucleoside
  modified_base (18)..(18): 2' O-methyl modified nucleoside
  modified_base (19)..(19): 2' fluoro-modified nucleoside
  misc_feature (19)..(20): Phosphorothioate linkage
  modified_base (20)..(20): 2' O-methyl modified nucleoside
  misc_feature (20)..(21): Phosphorothioate linkage
  modified_base (21)..(21): 2' O-methyl modified nucleoside
ggcuacugguacaacugcauu

SEQ ID NO: 11343 - RNA, 21 nt, Artificial Sequence
  Description of Artificial Sequence: Synthetic oligonucleotide
  modified_base (1)..(1): 2' fluoro-modified nucleoside
  misc_feature (1)..(2): Phosphorothioate linkage
  modified_base (2)..(2): 2' O-methyl modified nucleoside
  misc_feature (2)..(3): Phosphorothioate linkage
  modified_base (3)..(3): 2' fluoro-modified nucleoside
  modified_base (4)..(4): 2' O-methyl modified nucleoside
  modified_base (5)..(5): 2' fluoro-modified nucleoside
  modified_base (6)..(6): 2' O-methyl modified nucleoside
  modified_base (7)..(7): 2' fluoro-modified nucleoside
  modified_base (8)..(8): 2' fluoro-modified nucleoside
  modified_base (9)..(9): 2' fluoro-modified nucleoside
  modified_base (10)..(10): 2' O-methyl modified nucleoside
  modified_base (11)..(11): 2' fluoro-modified nucleoside
  modified_base (12)..(12): 2' O-methyl modified nucleoside
  modified_base (13)..(13): 2' fluoro-modified nucleoside
  modified_base (14)..(14): 2' O-methyl modified nucleoside
  modified_base (15)..(15): 2' fluoro-modified nucleoside
  modified_base (16)..(16): 2' O-methyl modified nucleoside
  modified_base (17)..(17): 2' fluoro-modified nucleoside
  modified_base (18)..(18): 2' O-methyl modified nucleoside
  modified_base (19)..(19): 2' fluoro-modified nucleoside
  misc_feature (19)..(20): Phosphorothioate linkage
  modified_base (20)..(20): 2' O-methyl modified nucleoside
  misc_feature (20)..(21): Phosphorothioate linkage
  modified_base (21)..(21): 2' O-methyl modified nucleoside
gcuacugguacaacugcuauu

SEQ ID NO: 11344 - RNA, 21 nt, Artificial Sequence
  Description of Artificial Sequence: Synthetic oligonucleotide
  modified_base (1)..(1): 2' fluoro-modified nucleoside
  misc_feature (1)..(2): Phosphorothioate linkage
  modified_base (2)..(2): 2' O-methyl modified nucleoside
  misc_feature (2)..(3): Phosphorothioate linkage
  modified_base (3)..(3): 2' fluoro-modified nucleoside
  modified_base (4)..(4): 2' O-methyl modified nucleoside
  modified_base (5)..(5): 2' fluoro-modified nucleoside
  modified_base (6)..(6): 2' O-methyl modified nucleoside
  modified_base (7)..(7): 2' fluoro-modified nucleoside
  modified_base (8)..(8): 2' fluoro-modified nucleoside
  modified_base (9)..(9): 2' fluoro-modified nucleoside
  modified_base (10)..(10): 2' O-methyl modified nucleoside
  modified_base (11)..(11): 2' fluoro-modified nucleoside
  modified_base (12)..(12): 2' O-methyl modified nucleoside
  modified_base (13)..(13): 2' fluoro-modified nucleoside
  modified_base (14)..(14): 2' O-methyl modified nucleoside
  modified_base (15)..(15): 2' fluoro-modified nucleoside
  modified_base (16)..(16): 2' O-methyl modified nucleoside
  modified_base (17)..(17): 2' fluoro-modified nucleoside
  modified_base (18)..(18): 2' O-methyl modified nucleoside
  modified_base (19)..(19): 2' fluoro-modified nucleoside
  misc_feature (19)..(20): Phosphorothioate linkage
  modified_base (20)..(20): 2' O-methyl modified nucleoside
  misc_feature (20)..(21): Phosphorothioate linkage
  modified_base (21)..(21): 2' O-methyl modified nucleoside
acugguacaacugcugcaauu

SEQ ID NO: 11345 - RNA, 21 nt, Artificial Sequence
  Description of Artificial Sequence: Synthetic oligonucleotide
  modified_base (1)..(1): 2' fluoro-modified nucleoside
  misc_feature (1)..(2): Phosphorothioate linkage
  modified_base (2)..(2): 2' O-methyl modified nucleoside
  misc_feature (2)..(3): Phosphorothioate linkage
  modified_base (3)..(3): 2' fluoro-modified nucleoside
  modified_base (4)..(4): 2' O-methyl modified nucleoside
  modified_base (5)..(5): 2' fluoro-modified nucleoside
  modified_base (6)..(6): 2' O-methyl modified nucleoside
  modified_base (7)..(7): 2' fluoro-modified nucleoside
  modified_base (8)..(8): 2' fluoro-modified nucleoside
  modified_base (9)..(9): 2' fluoro-modified nucleoside
  modified_base (10)..(10): 2' O-methyl modified nucleoside
  modified_base (11)..(11): 2' fluoro-modified nucleoside
  modified_base (12)..(12): 2' O-methyl modified nucleoside
  modified_base (13)..(13): 2' fluoro-modified nucleoside
  modified_base (14)..(14): 2' O-methyl modified nucleoside
  modified_base (15)..(15): 2' fluoro-modified nucleoside
  modified_base (16)..(16): 2' O-methyl modified nucleoside
  modified_base (17)..(17): 2' fluoro-modified nucleoside
  modified_base (18)..(18): 2' O-methyl modified nucleoside
  modified_base (19)..(19): 2' fluoro-modified nucleoside
  misc_feature (19)..(20): Phosphorothioate linkage
  modified_base (20)..(20): 2' O-methyl modified nucleoside
  misc_feature (20)..(21): Phosphorothioate linkage
  modified_base (21)..(21): 2' O-methyl modified nucleoside
ugguacaacugcugcacaauu

SEQ ID NO: 11346 - RNA, 21 nt, Artificial Sequence
  Description of Artificial Sequence: Synthetic oligonucleotide
  modified_base (1)..(1): 2' fluoro-modified nucleoside
  misc_feature (1)..(2): Phosphorothioate linkage
  modified_base (2)..(2): 2' O-methyl modified nucleoside
  misc_feature (2)..(3): Phosphorothioate linkage
  modified_base (3)..(3): 2' fluoro-modified nucleoside
  modified_base (4)..(4): 2' O-methyl modified nucleoside
  modified_base (5)..(5): 2' fluoro-modified nucleoside
  modified_base (6)..(6): 2' O-methyl modified nucleoside
  modified_base (7)..(7): 2' fluoro-modified nucleoside
  modified_base (8)..(8): 2' fluoro-modified nucleoside
  modified_base (9)..(9): 2' fluoro-modified nucleoside
  modified_base (10)..(10): 2' O-methyl modified nucleoside
  modified_base (11)..(11): 2' fluoro-modified nucleoside
  modified_base (12)..(12): 2' O-methyl modified nucleoside
  modified_base (13)..(13): 2' fluoro-modified nucleoside
  modified_base (14)..(14): 2' O-methyl modified nucleoside
  modified_base (15)..(15): 2' fluoro-modified nucleoside
  modified_base (16)..(16): 2' O-methyl modified nucleoside
  modified_base (17)..(17): 2' fluoro-modified nucleoside
  modified_base (18)..(18): 2' O-methyl modified nucleoside
  modified_base (19)..(19): 2' fluoro-modified nucleoside
  misc_feature (19)..(20): Phosphorothioate linkage
  modified_base (20)..(20): 2' O-methyl modified nucleoside
  misc_feature (20)..(21): Phosphorothioate linkage
  modified_base (21)..(21): 2' O-methyl modified nucleoside
gguacaacugcugcacagauu

SEQ ID NO: 11347 - RNA, 21 nt, Artificial Sequence
  Description of Artificial Sequence: Synthetic oligonucleotide
  modified_base (1)..(1): 2' fluoro-modified nucleoside
  misc_feature (1)..(2): Phosphorothioate linkage
  modified_base (2)..(2): 2' O-methyl modified nucleoside
  misc_feature (2)..(3): Phosphorothioate linkage
  modified_base (3)..(3): 2' fluoro-modified nucleoside
  modified_base (4)..(4): 2' O-methyl modified nucleoside
  modified_base (5)..(5): 2' fluoro-modified nucleoside
  modified_base (6)..(6): 2' O-methyl modified nucleoside
  modified_base (7)..(7): 2' fluoro-modified nucleoside
  modified_base (8)..(8): 2' fluoro-modified nucleoside
  modified_base (9)..(9): 2' fluoro-modified nucleoside
  modified_base (10)..(10): 2' O-methyl modified nucleoside
  modified_base (11)..(11): 2' fluoro-modified nucleoside
  modified_base (12)..(12): 2' O-methyl modified nucleoside
  modified_base (13)..(13): 2' fluoro-modified nucleoside
  modified_base (14)..(14): 2' O-methyl modified nucleoside
  modified_base (15)..(15): 2' fluoro-modified nucleoside
  modified_base (16)..(16): 2' O-methyl modified nucleoside
  modified_base (17)..(17): 2' fluoro-modified nucleoside
  modified_base (18)..(18): 2' O-methyl modified nucleoside
  modified_base (19)..(19): 2' fluoro-modified nucleoside
  misc_feature (19)..(20): Phosphorothioate linkage
  modified_base (20)..(20): 2' O-methyl modified nucleoside
  misc_feature (20)..(21): Phosphorothioate linkage
  modified_base (21)..(21): 2' O-methyl modified nucleoside
guacaacugcugcacagaauu

SEQ ID NO: 11348 - RNA, 21 nt, Artificial Sequence
  Description of Artificial Sequence: Synthetic oligonucleotide
  modified_base (1)..(1): 2' fluoro-modified nucleoside
  misc_feature (1)..(2): Phosphorothioate linkage
  modified_base (2)..(2): 2' O-methyl modified nucleoside
  misc_feature (2)..(3): Phosphorothioate linkage
  modified_base (3)..(3): 2' fluoro-modified nucleoside
  modified_base (4)..(4): 2' O-methyl modified nucleoside
  modified_base (5)..(5): 2' fluoro-modified nucleoside
  modified_base (6)..(6): 2' O-methyl modified nucleoside
  modified_base (7)..(7): 2' fluoro-modified nucleoside
  modified_base (8)..(8): 2' fluoro-modified nucleoside
  modified_base (9)..(9): 2' fluoro-modified nucleoside
  modified_base (10)..(10): 2' O-methyl modified nucleoside
  modified_base (11)..(11): 2' fluoro-modified nucleoside
  modified_base (12)..(12): 2' O-methyl modified nucleoside
  modified_base (13)..(13): 2' fluoro-modified nucleoside
  modified_base (14)..(14): 2' O-methyl modified nucleoside
  modified_base (15)..(15): 2' fluoro-modified nucleoside
  modified_base (16)..(16): 2' O-methyl modified nucleoside
  modified_base (17)..(17): 2' fluoro-modified nucleoside
  modified_base (18)..(18): 2' O-methyl modified nucleoside
  modified_base (19)..(19): 2' fluoro-modified nucleoside
  misc_feature (19)..(20): Phosphorothioate linkage
  modified_base (20)..(20): 2' O-methyl modified nucleoside
  misc_feature (20)..(21): Phosphorothioate linkage
  modified_base (21)..(21): 2' O-methyl modified nucleoside
uacaacugcugcacagacauu

SEQ ID NO: 11349 - RNA, 21 nt, Artificial Sequence
  Description of Artificial Sequence: Synthetic oligonucleotide
  modified_base (1)..(1): 2' fluoro-modified nucleoside
  misc_feature (1)..(2): Phosphorothioate linkage
  modified_base (2)..(2): 2' O-methyl modified nucleoside
  misc_feature (2)..(3): Phosphorothioate linkage
  modified_base (3)..(3): 2' fluoro-modified nucleoside
  modified_base (4)..(4): 2' O-methyl modified nucleoside
  modified_base (5)..(5): 2' fluoro-modified nucleoside
  modified_base (6)..(6): 2' O-methyl modified nucleoside
  modified_base (7)..(7): 2' fluoro-modified nucleoside
  modified_base (8)..(8): 2' fluoro-modified nucleoside
  modified_base (9)..(9): 2' fluoro-modified nucleoside
  modified_base (10)..(10): 2' O-methyl modified nucleoside
  modified_base (11)..(11): 2' fluoro-modified nucleoside
  modified_base (12)..(12): 2' O-methyl modified nucleoside
  modified_base (13)..(13): 2' fluoro-modified nucleoside
  modified_base (14)..(14): 2' O-methyl modified nucleoside
  modified_base (15)..(15): 2' fluoro-modified nucleoside
  modified_base (16)..(16): 2' O-methyl modified nucleoside
  modified_base (17)..(17): 2' fluoro-modified nucleoside
  modified_base (18)..(18): 2' O-methyl modified nucleoside
  modified_base (19)..(19): 2' fluoro-modified nucleoside
  misc_feature (19)..(20): Phosphorothioate linkage
  modified_base (20)..(20): 2' O-methyl modified nucleoside
  misc_feature (20)..(21): Phosphorothioate linkage
  modified_base (21)..(21): 2' O-methyl modified nucleoside
cugcugcacagacuccaaauu

SEQ ID NO: 11350 - RNA, 21 nt, Artificial Sequence
  Description of Artificial Sequence: Synthetic oligonucleotide
  modified_base (1)..(1): 2' fluoro-modified nucleoside
  misc_feature (1)..(2): Phosphorothioate linkage
  modified_base (2)..(2): 2' O-methyl modified nucleoside
  misc_feature (2)..(3): Phosphorothioate linkage
  modified_base (3)..(3): 2' fluoro-modified nucleoside
  modified_base (4)..(4): 2' O-methyl modified nucleoside
  modified_base (5)..(5): 2' fluoro-modified nucleoside
  modified_base (6)..(6): 2' O-methyl modified nucleoside
  modified_base (7)..(7): 2' fluoro-modified nucleoside
  modified_base (8)..(8): 2' fluoro-modified nucleoside
  modified_base (9)..(9): 2' fluoro-modified nucleoside
  modified_base (10)..(10): 2' O-methyl modified nucleoside
  modified_base (11)..(11): 2' fluoro-modified nucleoside
  modified_base (12)..(12): 2' O-methyl modified nucleoside
  modified_base (13)..(13): 2' fluoro-modified nucleoside
  modified_base (14)..(14): 2' O-methyl modified nucleoside
  modified_base (15)..(15): 2' fluoro-modified nucleoside
  modified_base (16)..(16): 2' O-methyl modified nucleoside
  modified_base (17)..(17): 2' fluoro-modified nucleoside
  modified_base (18)..(18): 2' O-methyl modified nucleoside
  modified_base (19)..(19): 2' fluoro-modified nucleoside
  misc_feature (19)..(20): Phosphorothioate linkage
  modified_base (20)..(20): 2' O-methyl modified nucleoside
  misc_feature (20)..(21): Phosphorothioate linkage
  modified_base (21)..(21): 2' O-methyl modified nucleoside
ugcugcacagacuccaacauu

SEQ ID NO: 11351 - RNA, 21 nt, Artificial Sequence
  Description of Artificial Sequence: Synthetic oligonucleotide
  modified_base (1)..(1): 2' fluoro-modified nucleoside
  misc_feature (1)..(2): Phosphorothioate linkage
  modified_base (2)..(2): 2' O-methyl modified nucleoside
  misc_feature (2)..(3): Phosphorothioate linkage
  modified_base (3)..(3): 2' fluoro-modified nucleoside
  modified_base (4)..(4): 2' O-methyl modified nucleoside
  modified_base (5)..(5): 2' fluoro-modified nucleoside
  modified_base (6)..(6): 2' O-methyl modified nucleoside
  modified_base (7)..(7): 2' fluoro-modified nucleoside
  modified_base (8)..(8): 2' fluoro-modified nucleoside
  modified_base (9)..(9): 2' fluoro-modified nucleoside
  modified_base (10)..(10): 2' O-methyl modified nucleoside
  modified_base (11)..(11): 2' fluoro-modified nucleoside
  modified_base (12)..(12): 2' O-methyl modified nucleoside
  modified_base (13)..(13): 2' fluoro-modified nucleoside
  modified_base (14)..(14): 2' O-methyl modified nucleoside
  modified_base (15)..(15): 2' fluoro-modified nucleoside
  modified_base (16)..(16): 2' O-methyl modified nucleoside
  modified_base (17)..(17): 2' fluoro-modified nucleoside
  modified_base (18)..(18): 2' O-methyl modified nucleoside
  modified_base (19)..(19): 2' fluoro-modified nucleoside
  misc_feature (19)..(20): Phosphorothioate linkage
  modified_base (20)..(20): 2' O-methyl modified nucleoside
  misc_feature (20)..(21): Phosphorothioate linkage
  modified_base (21)..(21): 2' O-methyl modified nucleoside
cugcacagacuccaaccuauu

SEQ ID NO: 11352 - RNA, 21 nt, Artificial Sequence
  Description of Artificial Sequence: Synthetic oligonucleotide
  modified_base (1)..(1): 2' fluoro-modified nucleoside
  misc_feature (1)..(2): Phosphorothioate linkage
  modified_base (2)..(2): 2' O-methyl modified nucleoside
  misc_feature (2)..(3): Phosphorothioate linkage
  modified_base (3)..(3): 2' fluoro-modified nucleoside
  modified_base (4)..(4): 2' O-methyl modified nucleoside
  modified_base (5)..(5): 2' fluoro-modified nucleoside
  modified_base (6)..(6): 2' O-methyl modified nucleoside
  modified_base (7)..(7): 2' fluoro-modified nucleoside
  modified_base (8)..(8): 2' fluoro-modified nucleoside
  modified_base (9)..(9): 2' fluoro-modified nucleoside
  modified_base (10)..(10): 2' O-methyl modified nucleoside
  modified_base (11)..(11): 2' fluoro-modified nucleoside
  modified_base (12)..(12): 2' O-methyl modified nucleoside
  modified_base (13)..(13): 2' fluoro-modified nucleoside
  modified_base (14)..(14): 2' O-methyl modified nucleoside
  modified_base (15)..(15): 2' fluoro-modified nucleoside
  modified_base (16)..(16): 2' O-methyl modified nucleoside
  modified_base (17)..(17): 2' fluoro-modified nucleoside
  modified_base (18)..(18): 2' O-methyl modified nucleoside
  modified_base (19)..(19): 2' fluoro-modified nucleoside
  misc_feature (19)..(20): Phosphorothioate linkage
  modified_base (20)..(20): 2' O-methyl modified nucleoside
  misc_feature (20)..(21): Phosphorothioate linkage
  modified_base (21)..(21): 2' O-methyl modified nucleoside
ugcacagacuccaaccucauu

SEQ ID NO: 11353 - RNA, 21 nt, Artificial Sequence
  Description of Artificial Sequence: Synthetic oligonucleotide
  modified_base (1)..(1): 2' fluoro-modified nucleoside
  misc_feature (1)..(2): Phosphorothioate linkage
  modified_base (2)..(2): 2' O-methyl modified nucleoside
  misc_feature (2)..(3): Phosphorothioate linkage
  modified_base (3)..(3): 2' fluoro-modified nucleoside
  modified_base (4)..(4): 2' O-methyl modified nucleoside
  modified_base (5)..(5): 2' fluoro-modified nucleoside
  modified_base (6)..(6): 2' O-methyl modified nucleoside
  modified_base (7)..(7): 2' fluoro-modified nucleoside
  modified_base (8)..(8): 2' fluoro-modified nucleoside
  modified_base (9)..(9): 2' fluoro-modified nucleoside
  modified_base (10)..(10): 2' O-methyl modified nucleoside
  modified_base (11)..(11): 2' fluoro-modified nucleoside
  modified_base (12)..(12): 2' O-methyl modified nucleoside
  modified_base (13)..(13): 2' fluoro-modified nucleoside
  modified_base (14)..(14): 2' O-methyl modified nucleoside
  modified_base (15)..(15): 2' fluoro-modified nucleoside
  modified_base (16)..(16): 2' O-methyl modified nucleoside
  modified_base (17)..(17): 2' fluoro-modified nucleoside
  modified_base (18)..(18): 2' O-methyl modified nucleoside
  modified_base (19)..(19): 2' fluoro-modified nucleoside
  misc_feature (19)..(20): Phosphorothioate linkage
  modified_base (20)..(20): 2' O-methyl modified nucleoside
  misc_feature (20)..(21): Phosphorothioate linkage
  modified_base (21)..(21): 2' O-methyl modified nucleoside
acagacuccaaccucaauauu

SEQ ID NO: 11354 - RNA, 21 nt, Artificial Sequence
  Description of Artificial Sequence: Synthetic oligonucleotide
  modified_base (1)..(1): 2' fluoro-modified nucleoside
  misc_feature (1)..(2): Phosphorothioate linkage
  modified_base (2)..(2): 2' O-methyl modified nucleoside
  misc_feature (2)..(3): Phosphorothioate linkage
  modified_base (3)..(3): 2' fluoro-modified nucleoside
  modified_base (4)..(4): 2' O-methyl modified nucleoside
  modified_base (5)..(5): 2' fluoro-modified nucleoside
  modified_base (6)..(6): 2' O-methyl modified nucleoside
  modified_base (7)..(7): 2' fluoro-modified nucleoside
  modified_base (8)..(8): 2' fluoro-modified nucleoside
  modified_base (9)..(9): 2' fluoro-modified nucleoside
  modified_base (10)..(10): 2' O-methyl modified nucleoside
  modified_base (11)..(11): 2' fluoro-modified nucleoside
  modified_base (12)..(12): 2' O-methyl modified nucleoside
  modified_base (13)..(13): 2' fluoro-modified nucleoside
  modified_base (14)..(14): 2' O-methyl modified nucleoside
  modified_base (15)..(15): 2' fluoro-modified nucleoside
  modified_base (16)..(16): 2' O-methyl modified nucleoside
  modified_base (17)..(17): 2' fluoro-modified nucleoside
  modified_base (18)..(18): 2' O-methyl modified nucleoside
  modified_base (19)..(19): 2' fluoro-modified nucleoside
  misc_feature (19)..(20): Phosphorothioate linkage
  modified_base (20)..(20): 2' O-methyl modified nucleoside
  misc_feature (20)..(21): Phosphorothioate linkage
  modified_base (21)..(21): 2' O-methyl modified nucleoside
cugguauggcuggcauggauu

SEQ ID NO: 11355 - RNA, 21 nt, Artificial Sequence
  Description of Artificial Sequence: Synthetic oligonucleotide
  modified_base (1)..(1): 2' O-methyl modified nucleoside
  misc_feature (1)..(2): Phosphorothioate linkage
  modified_base (2)..(2): 2' fluoro-modified nucleoside
  misc_feature (2)..(3): Phosphorothioate linkage
  modified_base (3)..(3): 2' O-methyl modified nucleoside
  modified_base (4)..(4): 2' fluoro-modified nucleoside
  modified_base (5)..(5): 2' O-methyl modified nucleoside
  modified_base (6)..(6): 2' fluoro-modified nucleoside
  modified_base (7)..(7): 2' O-methyl modified nucleoside
  modified_base (8)..(8): 2' fluoro-modified nucleoside
  modified_base (9)..(9): 2' O-methyl modified nucleoside
  modified_base (10)..(10): 2' fluoro-modified nucleoside
  modified_base (11)..(11): 2' O-methyl modified nucleoside
  modified_base (12)..(12): 2' O-methyl modified nucleoside
  modified_base (13)..(13): 2' O-methyl modified nucleoside
  modified_base (14)..(14): 2' fluoro-modified nucleoside
  modified_base (15)..(15): 2' O-methyl modified nucleoside
  modified_base (16)..(16): 2' fluoro-modified nucleoside
  modified_base (17)..(17): 2' O-methyl modified nucleoside
  modified_base (18)..(18): 2' fluoro-modified nucleoside
  modified_base (19)..(19): 2' O-methyl modified nucleoside
  misc_feature (19)..(20): Phosphorothioate linkage
  modified_base (20)..(20): 2' O-methyl modified nucleoside
  misc_feature (20)..(21): Phosphorothioate linkage
  modified_base (21)..(21): 2' O-methyl modified nucleoside
uucucuggaugaugguccauu

SEQ ID NO: 11356 - RNA, 21 nt, Artificial Sequence
  Description of Artificial Sequence: Synthetic oligonucleotide
  modified_base (1)..(1): 2' O-methyl modified nucleoside
  misc_feature (1)..(2): Phosphorothioate linkage
  modified_base (2)..(2): 2' fluoro-modified nucleoside
  misc_feature (2)..(3): Phosphorothioate linkage
  modified_base (3)..(3): 2' O-methyl modified nucleoside
  modified_base (4)..(4): 2' fluoro-modified nucleoside
  modified_base (5)..(5): 2' O-methyl modified nucleoside
  modified_base (6)..(6): 2' fluoro-modified nucleoside
  modified_base (7)..(7): 2' O-methyl modified nucleoside
  modified_base (8)..(8): 2' fluoro-modified nucleoside
  modified_base (9)..(9): 2' O-methyl modified nucleoside
  modified_base (10)..(10): 2' fluoro-modified nucleoside
  modified_base (11)..(11): 2' O-methyl modified nucleoside
  modified_base (12)..(12): 2' O-methyl modified nucleoside
  modified_base (13)..(13): 2' O-methyl modified nucleoside
  modified_base (14)..(14): 2' fluoro-modified nucleoside
  modified_base (15)..(15): 2' O-methyl modified nucleoside
  modified_base (16)..(16): 2' fluoro-modified nucleoside
  modified_base (17)..(17): 2' O-methyl modified nucleoside
  modified_base (18)..(18): 2' fluoro-modified nucleoside
  modified_base (19)..(19): 2' O-methyl modified nucleoside
  misc_feature (19)..(20): Phosphorothioate linkage
  modified_base (20)..(20): 2' O-methyl modified nucleoside
  misc_feature (20)..(21): Phosphorothioate linkage
  modified_base (21)..(21): 2' O-methyl modified nucleoside
ugucucuggaugaugguccuu

SEQ ID NO: 11357 - RNA, 21 nt, Artificial Sequence
  Description of Artificial Sequence: Synthetic oligonucleotide
  modified_base (1)..(1): 2' O-methyl modified nucleoside
  misc_feature (1)..(2): Phosphorothioate linkage
  modified_base (2)..(2): 2' fluoro-modified nucleoside
  misc_feature (2)..(3): Phosphorothioate linkage
  modified_base (3)..(3): 2' O-methyl modified nucleoside
  modified_base (4)..(4): 2' fluoro-modified nucleoside
  modified_base (5)..(5): 2' O-methyl modified nucleoside
  modified_base (6)..(6): 2' fluoro-modified nucleoside
  modified_base (7)..(7): 2' O-methyl modified nucleoside
  modified_base (8)..(8): 2' fluoro-modified nucleoside
  modified_base (9)..(9): 2' O-methyl modified nucleoside
  modified_base (10)..(10): 2' fluoro-modified nucleoside
  modified_base (11)..(11): 2' O-methyl modified nucleoside
  modified_base (12)..(12): 2' O-methyl modified nucleoside
  modified_base (13)..(13): 2' O-methyl modified nucleoside
  modified_base (14)..(14): 2' fluoro-modified nucleoside
  modified_base (15)..(15): 2' O-methyl modified nucleoside
  modified_base (16)..(16): 2' fluoro-modified nucleoside
  modified_base (17)..(17): 2' O-methyl modified nucleoside
  modified_base (18)..(18): 2' fluoro-modified nucleoside
  modified_base (19)..(19): 2' O-methyl modified nucleoside
  misc_feature (19)..(20): Phosphorothioate linkage
  modified_base (20)..(20): 2' O-methyl modified nucleoside
  misc_feature (20)..(21): Phosphorothioate linkage
  modified_base (21)..(21): 2' O-methyl modified nucleoside
uguuccccaggaagaggcguu

SEQ ID NO: 11358 - RNA, 21 nt, Artificial Sequence
  Description of Artificial Sequence: Synthetic oligonucleotide
  modified_base (1)..(1): 2' O-methyl modified nucleoside
  misc_feature (1)..(2): Phosphorothioate linkage
  modified_base (2)..(2): 2' fluoro-modified nucleoside
  misc_feature (2)..(3): Phosphorothioate linkage
  modified_base (3)..(3): 2' O-methyl modified nucleoside
  modified_base (4)..(4): 2' fluoro-modified nucleoside
  modified_base (5)..(5): 2' O-methyl modified nucleoside
  modified_base (6)..(6): 2' fluoro-modified nucleoside
  modified_base (7)..(7): 2' O-methyl modified nucleoside
  modified_base (8)..(8): 2' fluoro-modified nucleoside
  modified_base (9)..(9): 2' O-methyl modified nucleoside
  modified_base (10)..(10): 2' fluoro-modified nucleoside
  modified_base (11)..(11): 2' O-methyl modified nucleoside
  modified_base (12)..(12): 2' O-methyl modified nucleoside
  modified_base (13)..(13): 2' O-methyl modified nucleoside
  modified_base (14)..(14): 2' fluoro-modified nucleoside
  modified_base (15)..(15): 2' O-methyl modified nucleoside
  modified_base (16)..(16): 2' fluoro-modified nucleoside
  modified_base (17)..(17): 2' O-methyl modified nucleoside
  modified_base (18)..(18): 2' fluoro-modified nucleoside
  modified_base (19)..(19): 2' O-methyl modified nucleoside
  misc_feature (19)..(20): Phosphorothioate linkage
  modified_base (20)..(20): 2' O-methyl modified nucleoside
  misc_feature (20)..(21): Phosphorothioate linkage
  modified_base (21)..(21): 2' O-methyl modified nucleoside
ucuuguccaagcaguugucuu

SEQ ID NO: 11359 - RNA, 21 nt, Artificial Sequence
  Description of Artificial Sequence: Synthetic oligonucleotide
  modified_base (1)..(1): 2' O-methyl modified nucleoside
  misc_feature (1)..(2): Phosphorothioate linkage
  modified_base (2)..(2): 2' fluoro-modified nucleoside
  misc_feature (2)..(3): Phosphorothioate linkage
  modified_base (3)..(3): 2' O-methyl modified nucleoside
  modified_base (4)..(4): 2' fluoro-modified nucleoside
  modified_base (5)..(5): 2' O-methyl modified nucleoside
  modified_base (6)..(6): 2' fluoro-modified nucleoside
  modified_base (7)..(7): 2' O-methyl modified nucleoside
  modified_base (8)..(8): 2' fluoro-modified nucleoside
  modified_base (9)..(9): 2' O-methyl modified nucleoside
  modified_base (10)..(10): 2' fluoro-modified nucleoside
  modified_base (11)..(11): 2' O-methyl modified nucleoside
  modified_base (12)..(12): 2' O-methyl modified nucleoside
  modified_base (13)..(13): 2' O-methyl modified nucleoside
  modified_base (14)..(14): 2' fluoro-modified nucleoside
  modified_base (15)..(15): 2' O-methyl modified nucleoside
  modified_base (16)..(16): 2' fluoro-modified nucleoside
  modified_base (17)..(17): 2' O-methyl modified nucleoside
  modified_base (18)..(18): 2' fluoro-modified nucleoside
  modified_base (19)..(19): 2' O-methyl modified nucleoside
  misc_feature (19)..(20): Phosphorothioate linkage
  modified_base (20)..(20): 2' O-methyl modified nucleoside
  misc_feature (20)..(21): Phosphorothioate linkage
  modified_base (21)..(21): 2' O-methyl modified nucleoside
uacuuguccaagcaguuguuu

SEQ ID NO: 11360 - RNA, 21 nt, Artificial Sequence
  Description of Artificial Sequence: Synthetic oligonucleotide
  modified_base (1)..(1): 2' O-methyl modified nucleoside
  misc_feature (1)..(2): Phosphorothioate linkage
  modified_base (2)..(2): 2' fluoro-modified nucleoside
  misc_feature (2)..(3): Phosphorothioate linkage
  modified_base (3)..(3): 2' O-methyl modified nucleoside
  modified_base (4)..(4): 2' fluoro-modified nucleoside
  modified_base (5)..(5): 2' O-methyl modified nucleoside
  modified_base (6)..(6): 2' fluoro-modified nucleoside
  modified_base (7)..(7): 2' O-methyl modified nucleoside
  modified_base (8)..(8): 2' fluoro-modified nucleoside
  modified_base (9)..(9): 2' O-methyl modified nucleoside
  modified_base (10)..(10): 2' fluoro-modified nucleoside
  modified_base (11)..(11): 2' O-methyl modified nucleoside
  modified_base (12)..(12): 2' O-methyl modified nucleoside
  modified_base (13)..(13): 2' O-methyl modified nucleoside
  modified_base (14)..(14): 2' fluoro-modified nucleoside
  modified_base (15)..(15): 2' O-methyl modified nucleoside
  modified_base (16)..(16): 2' fluoro-modified nucleoside
  modified_base (17)..(17): 2' O-methyl modified nucleoside
  modified_base (18)..(18): 2' fluoro-modified nucleoside
  modified_base (19)..(19): 2' O-methyl modified nucleoside
  misc_feature (19)..(20): Phosphorothioate linkage
  modified_base (20)..(20): 2' O-methyl modified nucleoside
  misc_feature (20)..(21): Phosphorothioate linkage
  modified_base (21)..(21): 2' O-methyl modified nucleoside
uuguaccaguagccaccuuuu

SEQ ID NO: 11361 - RNA, 21 nt, Artificial Sequence
  Description of Artificial Sequence: Synthetic oligonucleotide
  modified_base (1)..(1): 2' O-methyl modified nucleoside
  misc_feature (1)..(2): Phosphorothioate linkage
  modified_base (2)..(2): 2' fluoro-modified nucleoside
  misc_feature (2)..(3): Phosphorothioate linkage
  modified_base (3)..(3): 2' O-methyl modified nucleoside
  modified_base (4)..(4): 2' fluoro-modified nucleoside
  modified_base (5)..(5): 2' O-methyl modified nucleoside
  modified_base (6)..(6): 2' fluoro-modified nucleoside
  modified_base (7)..(7): 2' O-methyl modified nucleoside
  modified_base (8)..(8): 2' fluoro-modified nucleoside
  modified_base (9)..(9): 2' O-methyl modified nucleoside
  modified_base (10)..(10): 2' fluoro-modified nucleoside
  modified_base (11)..(11): 2' O-methyl modified nucleoside
  modified_base (12)..(12): 2' O-methyl modified nucleoside
  modified_base (13)..(13): 2' O-methyl modified nucleoside
  modified_base (14)..(14): 2' fluoro-modified nucleoside
  modified_base (15)..(15): 2' O-methyl modified nucleoside
  modified_base (16)..(16): 2' fluoro-modified nucleoside
  modified_base (17)..(17): 2' O-methyl modified nucleoside
  modified_base (18)..(18): 2' fluoro-modified nucleoside
  modified_base (19)..(19): 2' O-methyl modified nucleoside
  misc_feature (19)..(20): Phosphorothioate linkage
  modified_base (20)..(20): 2' O-methyl modified nucleoside
  misc_feature (20)..(21): Phosphorothioate linkage
  modified_base (21)..(21): 2' O-methyl modified nucleoside
uuuguaccaguagccaccuuu

SEQ ID NO: 11362 - RNA, 21 nt, Artificial Sequence
  Description of Artificial Sequence: Synthetic oligonucleotide
  modified_base (1)..(1): 2' O-methyl modified nucleoside
  misc_feature (1)..(2): Phosphorothioate linkage
  modified_base (2)..(2): 2' fluoro-modified nucleoside
  misc_feature (2)..(3): Phosphorothioate linkage
  modified_base (3)..(3): 2' O-methyl modified nucleoside
  modified_base (4)..(4): 2' fluoro-modified nucleoside
  modified_base (5)..(5): 2' O-methyl modified nucleoside
  modified_base (6)..(6): 2' fluoro-modified nucleoside
  modified_base (7)..(7): 2' O-methyl modified nucleoside
  modified_base (8)..(8): 2' fluoro-modified nucleoside
  modified_base (9)..(9): 2' O-methyl modified nucleoside
  modified_base (10)..(10): 2' fluoro-modified nucleoside
  modified_base (11)..(11): 2' O-methyl modified nucleoside
  modified_base (12)..(12): 2' O-methyl modified nucleoside
  modified_base (13)..(13): 2' O-methyl modified nucleoside
  modified_base (14)..(14): 2' fluoro-modified nucleoside
  modified_base (15)..(15): 2' O-methyl modified nucleoside
  modified_base (16)..(16): 2' fluoro-modified nucleoside
  modified_base (17)..(17): 2' O-methyl modified nucleoside
  modified_base (18)..(18): 2' fluoro-modified nucleoside
  modified_base (19)..(19): 2' O-methyl modified nucleoside
  misc_feature (19)..(20): Phosphorothioate linkage
  modified_base (20)..(20): 2' O-methyl modified nucleoside
  misc_feature (20)..(21): Phosphorothioate linkage
  modified_base (21)..(21): 2' O-methyl modified nucleoside
uaguuguaccaguagccacuu

SEQ ID NO: 11363 - RNA, 21 nt, Artificial Sequence
  Description of Artificial Sequence: Synthetic oligonucleotide
  modified_base (1)..(1): 2' O-methyl modified nucleoside
  misc_feature (1)..(2): Phosphorothioate linkage
  modified_base (2)..(2): 2' fluoro-modified nucleoside
  misc_feature (2)..(3): Phosphorothioate linkage
  modified_base (3)..(3): 2' O-methyl modified nucleoside
  modified_base (4)..(4): 2' fluoro-modified nucleoside
  modified_base (5)..(5): 2' O-methyl modified nucleoside
  modified_base (6)..(6): 2' fluoro-modified nucleoside
  modified_base (7)..(7): 2' O-methyl modified nucleoside
  modified_base (8)..(8): 2' fluoro-modified nucleoside
  modified_base (9)..(9): 2' O-methyl modified nucleoside
  modified_base (10)..(10): 2' fluoro-modified nucleoside
  modified_base (11)..(11): 2' O-methyl modified nucleoside
  modified_base (12)..(12): 2' O-methyl modified nucleoside
  modified_base (13)..(13): 2' O-methyl modified nucleoside
  modified_base (14)..(14): 2' fluoro-modified nucleoside
  modified_base (15)..(15): 2' O-methyl modified nucleoside
  modified_base (16)..(16): 2' fluoro-modified nucleoside
  modified_base (17)..(17): 2' O-methyl modified nucleoside
  modified_base (18)..(18): 2' fluoro-modified nucleoside
  modified_base (19)..(19): 2' O-methyl modified nucleoside
  misc_feature (19)..(20): Phosphorothioate linkage
  modified_base (20)..(20): 2' O-methyl modified nucleoside
  misc_feature (20)..(21): Phosphorothioate linkage
  modified_base (21)..(21): 2' O-methyl modified nucleoside
ucaguuguaccaguagccauu

SEQ ID NO: 11364 - RNA, 21 nt, Artificial Sequence
  Description of Artificial Sequence: Synthetic oligonucleotide
  modified_base (1)..(1): 2' O-methyl modified nucleoside
  misc_feature (1)..(2): Phosphorothioate linkage
  modified_base (2)..(2): 2' fluoro-modified nucleoside
  misc_feature (2)..(3): Phosphorothioate linkage
  modified_base (3)..(3): 2' O-methyl modified nucleoside
  modified_base (4)..(4): 2' fluoro-modified nucleoside
  modified_base (5)..(5): 2' O-methyl modified nucleoside
  modified_base (6)..(6): 2' fluoro-modified nucleoside
  modified_base (7)..(7): 2' O-methyl modified nucleoside
  modified_base (8)..(8): 2' fluoro-modified nucleoside
  modified_base (9)..(9): 2' O-methyl modified nucleoside
  modified_base (10)..(10): 2' fluoro-modified nucleoside
  modified_base (11)..(11): 2' O-methyl modified nucleoside
  modified_base (12)..(12): 2' O-methyl modified nucleoside
  modified_base (13)..(13): 2' O-methyl modified nucleoside
  modified_base (14)..(14): 2' fluoro-modified nucleoside
  modified_base (15)..(15): 2' O-methyl modified nucleoside
  modified_base (16)..(16): 2' fluoro-modified nucleoside
  modified_base (17)..(17): 2' O-methyl modified nucleoside
  modified_base (18)..(18): 2' fluoro-modified nucleoside
  modified_base (19)..(19): 2' O-methyl modified nucleoside
  misc_feature (19)..(20): Phosphorothioate linkage
  modified_base (20)..(20): 2' O-methyl modified nucleoside
  misc_feature (20)..(21): Phosphorothioate linkage
  modified_base (21)..(21): 2' O-methyl modified nucleoside
ugcaguuguaccaguagccuu

SEQ ID NO: 11365 - RNA, 21 nt, Artificial Sequence
  Description of Artificial Sequence: Synthetic oligonucleotide
  modified_base (1)..(1): 2' O-methyl modified nucleoside
  misc_feature (1)..(2): Phosphorothioate linkage
  modified_base (2)..(2): 2' fluoro-modified nucleoside
  misc_feature (2)..(3): Phosphorothioate linkage
  modified_base (3)..(3): 2' O-methyl modified nucleoside
  modified_base (4)..(4): 2' fluoro-modified nucleoside
  modified_base (5)..(5): 2' O-methyl modified nucleoside
  modified_base (6)..(6): 2' fluoro-modified nucleoside
  modified_base (7)..(7): 2' O-methyl modified nucleoside
  modified_base (8)..(8): 2' fluoro-modified nucleoside
  modified_base (9)..(9): 2' O-methyl modified nucleoside
  modified_base (10)..(10): 2' fluoro-modified nucleoside
  modified_base (11)..(11): 2' O-methyl modified nucleoside
  modified_base (12)..(12): 2' O-methyl modified nucleoside
  modified_base (13)..(13): 2' O-methyl modified nucleoside
  modified_base (14)..(14): 2' fluoro-modified nucleoside
  modified_base (15)..(15): 2' O-methyl modified nucleoside
  modified_base (16)..(16): 2' fluoro-modified nucleoside
  modified_base (17)..(17): 2' O-methyl modified nucleoside
  modified_base (18)..(18): 2' fluoro-modified nucleoside
  modified_base (19)..(19): 2' O-methyl modified nucleoside
  misc_feature (19)..(20): Phosphorothioate linkage
  modified_base (20)..(20): 2' O-methyl modified nucleoside
  misc_feature (20)..(21): Phosphorothioate linkage
  modified_base (21)..(21): 2' O-methyl modified nucleoside
uagcaguuguaccaguagcuu

SEQ ID NO: 11366 - RNA, 21 nt, Artificial Sequence
  Description of Artificial Sequence: Synthetic oligonucleotide
  modified_base (1)..(1): 2' O-methyl modified nucleoside
  misc_feature (1)..(2): Phosphorothioate linkage
  modified_base (2)..(2): 2' fluoro-modified nucleoside
  misc_feature (2)..(3): Phosphorothioate linkage
  modified_base (3)..(3): 2' O-methyl modified nucleoside
  modified_base (4)..(4): 2' fluoro-modified nucleoside
  modified_base (5)..(5): 2' O-methyl modified nucleoside
  modified_base (6)..(6): 2' fluoro-modified nucleoside
  modified_base (7)..(7): 2' O-methyl modified nucleoside
  modified_base (8)..(8): 2' fluoro-modified nucleoside
  modified_base (9)..(9): 2' O-methyl modified nucleoside
  modified_base (10)..(10): 2' fluoro-modified nucleoside
  modified_base (11)..(11): 2' O-methyl modified nucleoside
  modified_base (12)..(12): 2' O-methyl modified nucleoside
  modified_base (13)..(13): 2' O-methyl modified nucleoside
  modified_base (14)..(14): 2' fluoro-modified nucleoside
  modified_base (15)..(15): 2' O-methyl modified nucleoside
  modified_base (16)..(16): 2' fluoro-modified nucleoside
  modified_base (17)..(17): 2' O-methyl modified nucleoside
  modified_base (18)..(18): 2' fluoro-modified nucleoside
  modified_base (19)..(19): 2' O-methyl modified nucleoside
  misc_feature (19)..(20): Phosphorothioate linkage
  modified_base (20)..(20): 2' O-methyl modified nucleoside
  misc_feature (20)..(21): Phosphorothioate linkage
  modified_base (21)..(21): 2' O-methyl modified nucleoside
uugcagcaguuguaccaguuu

SEQ ID NO: 11367 - RNA, 21 nt, Artificial Sequence
  Description of Artificial Sequence: Synthetic oligonucleotide
  modified_base (1)..(1): 2' O-methyl modified nucleoside
  misc_feature (1)..(2): Phosphorothioate linkage
  modified_base (2)..(2): 2' fluoro-modified nucleoside
  misc_feature (2)..(3): Phosphorothioate linkage
  modified_base (3)..(3): 2' O-methyl modified nucleoside
  modified_base (4)..(4): 2' fluoro-modified nucleoside
  modified_base (5)..(5): 2' O-methyl modified nucleoside
  modified_base (6)..(6): 2' fluoro-modified nucleoside
  modified_base (7)..(7): 2' O-methyl modified nucleoside
  modified_base (8)..(8): 2' fluoro-modified nucleoside
  modified_base (9)..(9): 2' O-methyl modified nucleoside
  modified_base (10)..(10): 2' fluoro-modified nucleoside
  modified_base (11)..(11): 2' O-methyl modified nucleoside
  modified_base (12)..(12): 2' O-methyl modified nucleoside
  modified_base (13)..(13): 2' O-methyl modified nucleoside
  modified_base (14)..(14): 2' fluoro-modified nucleoside
  modified_base (15)..(15): 2' O-methyl modified nucleoside
  modified_base (16)..(16): 2' fluoro-modified nucleoside
  modified_base (17)..(17): 2' O-methyl modified nucleoside
  modified_base (18)..(18): 2' fluoro-modified nucleoside
  modified_base (19)..(19): 2' O-methyl modified nucleoside
  misc_feature (19)..(20): Phosphorothioate linkage
  modified_base (20)..(20): 2' O-methyl modified nucleoside
  misc_feature (20)..(21): Phosphorothioate linkage
  modified_base (21)..(21): 2' O-methyl modified nucleoside
uugugcagcaguuguaccauu

SEQ ID NO: 11368 - RNA, 21 nt, Artificial Sequence
  Description of Artificial Sequence: Synthetic oligonucleotide
  modified_base (1)..(1): 2' O-methyl modified nucleoside
  misc_feature (1)..(2): Phosphorothioate linkage
  modified_base (2)..(2): 2' fluoro-modified nucleoside
  misc_feature (2)..(3): Phosphorothioate linkage
  modified_base (3)..(3): 2' O-methyl modified nucleoside
  modified_base (4)..(4): 2' fluoro-modified nucleoside
  modified_base (5)..(5): 2' O-methyl modified nucleoside
  modified_base (6)..(6): 2' fluoro-modified nucleoside
  modified_base (7)..(7): 2' O-methyl modified nucleoside
  modified_base (8)..(8): 2' fluoro-modified nucleoside
  modified_base (9)..(9): 2' O-methyl modified nucleoside
  modified_base (10)..(10): 2' fluoro-modified nucleoside
  modified_base (11)..(11): 2' O-methyl modified nucleoside
  modified_base (12)..(12): 2' O-methyl modified nucleoside
  modified_base (13)..(13): 2' O-methyl modified nucleoside
  modified_base (14)..(14): 2' fluoro-modified nucleoside
  modified_base (15)..(15): 2' O-methyl modified nucleoside
  modified_base (16)..(16): 2' fluoro-modified nucleoside
  modified_base (17)..(17): 2' O-methyl modified nucleoside
  modified_base (18)..(18): 2' fluoro-modified nucleoside
  modified_base (19)..(19): 2' O-methyl modified nucleoside
  misc_feature (19)..(20): Phosphorothioate linkage
  modified_base (20)..(20): 2' O-methyl modified nucleoside
  misc_feature (20)..(21): Phosphorothioate linkage
  modified_base (21)..(21): 2' O-methyl modified nucleoside
ucugugcagcaguuguaccuu

SEQ ID NO: 11369 - RNA, 21 nt, Artificial Sequence
  Description of Artificial Sequence: Synthetic oligonucleotide
  modified_base (1)..(1): 2' O-methyl modified nucleoside
  misc_feature (1)..(2): Phosphorothioate linkage
  modified_base (2)..(2): 2' fluoro-modified nucleoside
  misc_feature (2)..(3): Phosphorothioate linkage
  modified_base (3)..(3): 2' O-methyl modified nucleoside
  modified_base (4)..(4): 2' fluoro-modified nucleoside
  modified_base (5)..(5): 2' O-methyl modified nucleoside
  modified_base (6)..(6): 2' fluoro-modified nucleoside
  modified_base (7)..(7): 2' O-methyl modified nucleoside
  modified_base (8)..(8): 2' fluoro-modified nucleoside
  modified_base (9)..(9): 2' O-methyl modified nucleoside
  modified_base (10)..(10): 2' fluoro-modified nucleoside
  modified_base (11)..(11): 2' O-methyl modified nucleoside
  modified_base (12)..(12): 2' O-methyl modified nucleoside
  modified_base (13)..(13): 2' O-methyl modified nucleoside
  modified_base (14)..(14): 2' fluoro-modified nucleoside
  modified_base (15)..(15): 2' O-methyl modified nucleoside
  modified_base (16)..(16): 2' fluoro-modified nucleoside
  modified_base (17)..(17): 2' O-methyl modified nucleoside
  modified_base (18)..(18): 2' fluoro-modified nucleoside
  modified_base (19)..(19): 2' O-methyl modified nucleoside
  misc_feature (19)..(20): Phosphorothioate linkage
  modified_base (20)..(20): 2' O-methyl modified nucleoside
  misc_feature (20)..(21): Phosphorothioate linkage
  modified_base (21)..(21): 2' O-methyl modified nucleoside
uucugugcagcaguuguacuu

SEQ ID NO: 11370 - RNA, 21 nt, Artificial Sequence
  Description of Artificial Sequence: Synthetic oligonucleotide
  modified_base (1)..(1): 2' O-methyl modified nucleoside
  misc_feature (1)..(2): Phosphorothioate linkage
  modified_base (2)..(2): 2' fluoro-modified nucleoside
  misc_feature (2)..(3): Phosphorothioate linkage
  modified_base (3)..(3): 2' O-methyl modified nucleoside
  modified_base (4)..(4): 2' fluoro-modified nucleoside
  modified_base (5)..(5): 2' O-methyl modified nucleoside
  modified_base (6)..(6): 2' fluoro-modified nucleoside
  modified_base (7)..(7): 2' O-methyl modified nucleoside
  modified_base (8)..(8): 2' fluoro-modified nucleoside
  modified_base (9)..(9): 2' O-methyl modified nucleoside
  modified_base (10)..(10): 2' fluoro-modified nucleoside
  modified_base (11)..(11): 2' O-methyl modified nucleoside
  modified_base (12)..(12): 2' O-methyl modified nucleoside
  modified_base (13)..(13): 2' O-methyl modified nucleoside
  modified_base (14)..(14): 2' fluoro-modified nucleoside
  modified_base (15)..(15): 2' O-methyl modified nucleoside
  modified_base (16)..(16): 2' fluoro-modified nucleoside
  modified_base (17)..(17): 2' O-methyl modified nucleoside
  modified_base (18)..(18): 2' fluoro-modified nucleoside
  modified_base (19)..(19): 2' O-methyl modified nucleoside
  misc_feature (19)..(20): Phosphorothioate linkage
  modified_base (20)..(20): 2' O-methyl modified nucleoside
  misc_feature (20)..(21): Phosphorothioate linkage
  modified_base (21)..(21): 2' O-methyl modified nucleoside
ugucugugcagcaguuguauu

SEQ ID NO: 11371 - RNA, 21 nt, Artificial Sequence
  Description of Artificial Sequence: Synthetic oligonucleotide
  modified_base (1)..(1): 2' O-methyl modified nucleoside
  misc_feature (1)..(2): Phosphorothioate linkage
  modified_base (2)..(2): 2' fluoro-modified nucleoside
  misc_feature (2)..(3): Phosphorothioate linkage
  modified_base (3)..(3): 2' O-methyl modified nucleoside
  modified_base (4)..(4): 2' fluoro-modified nucleoside
  modified_base (5)..(5): 2' O-methyl modified nucleoside
  modified_base (6)..(6): 2' fluoro-modified nucleoside
  modified_base (7)..(7): 2' O-methyl modified nucleoside
  modified_base (8)..(8): 2' fluoro-modified nucleoside
  modified_base (9)..(9): 2' O-methyl modified nucleoside
  modified_base (10)..(10): 2' fluoro-modified nucleoside
  modified_base (11)..(11): 2' O-methyl modified nucleoside
  modified_base (12)..(12): 2' O-methyl modified nucleoside
  modified_base (13)..(13): 2' O-methyl modified nucleoside
  modified_base (14)..(14): 2' fluoro-modified nucleoside
  modified_base (15)..(15): 2' O-methyl modified nucleoside
  modified_base (16)..(16): 2' fluoro-modified nucleoside
  modified_base (17)..(17): 2' O-methyl modified nucleoside
  modified_base (18)..(18): 2' fluoro-modified nucleoside
  modified_base (19)..(19): 2' O-methyl modified nucleoside
  misc_feature (19)..(20): Phosphorothioate linkage
  modified_base (20)..(20): 2' O-methyl modified nucleoside
  misc_feature (20)..(21): Phosphorothioate linkage
  modified_base (21)..(21): 2' O-methyl modified nucleoside
uuuggagucugugcagcaguu

SEQ ID NO: 11372 - RNA, 21 nt, Artificial Sequence
  Description of Artificial Sequence: Synthetic oligonucleotide
  modified_base (1)..(1): 2' O-methyl modified nucleoside
  misc_feature (1)..(2): Phosphorothioate linkage
  modified_base (2)..(2): 2' fluoro-modified nucleoside
  misc_feature (2)..(3): Phosphorothioate linkage
  modified_base (3)..(3): 2' O-methyl modified nucleoside
  modified_base (4)..(4): 2' fluoro-modified nucleoside
  modified_base (5)..(5): 2' O-methyl modified nucleoside
  modified_base (6)..(6): 2' fluoro-modified nucleoside
  modified_base (7)..(7): 2' O-methyl modified nucleoside
  modified_base (8)..(8): 2' fluoro-modified nucleoside
  modified_base (9)..(9): 2' O-methyl modified nucleoside
  modified_base (10)..(10): 2' fluoro-modified nucleoside
  modified_base (11)..(11): 2' O-methyl modified nucleoside
  modified_base (12)..(12): 2' O-methyl modified nucleoside
  modified_base (13)..(13): 2' O-methyl modified nucleoside
  modified_base (14)..(14): 2' fluoro-modified nucleoside
  modified_base (15)..(15): 2' O-methyl modified nucleoside
  modified_base (16)..(16): 2' fluoro-modified nucleoside
  modified_base (17)..(17): 2' O-methyl modified nucleoside
  modified_base (18)..(18): 2' fluoro-modified nucleoside
  modified_base (19)..(19): 2' O-methyl modified nucleoside
  misc_feature (19)..(20): Phosphorothioate linkage
  modified_base (20)..(20): 2' O-methyl modified nucleoside
  misc_feature (20)..(21): Phosphorothioate linkage
  modified_base (21)..(21): 2' O-methyl modified nucleoside
uguuggagucugugcagcauu

SEQ ID NO: 11373 - RNA, 21 nt, Artificial Sequence
  Description of Artificial Sequence: Synthetic oligonucleotide
  modified_base (1)..(1): 2' O-methyl modified nucleoside
  misc_feature (1)..(2): Phosphorothioate linkage
  modified_base (2)..(2): 2' fluoro-modified nucleoside
  misc_feature (2)..(3): Phosphorothioate linkage
  modified_base (3)..(3): 2' O-methyl modified nucleoside
  modified_base (4)..(4): 2' fluoro-modified nucleoside
  modified_base (5)..(5): 2' O-methyl modified nucleoside
  modified_base (6)..(6): 2' fluoro-modified nucleoside
  modified_base (7)..(7): 2' O-methyl modified nucleoside
  modified_base (8)..(8): 2' fluoro-modified nucleoside
  modified_base (9)..(9): 2' O-methyl modified nucleoside
  modified_base (10)..(10): 2' fluoro-modified nucleoside
  modified_base (11)..(11): 2' O-methyl modified nucleoside
  modified_base (12)..(12): 2' O-methyl modified nucleoside
  modified_base (13)..(13): 2' O-methyl modified nucleoside
  modified_base (14)..(14): 2' fluoro-modified nucleoside
  modified_base (15)..(15): 2' O-methyl modified nucleoside
  modified_base (16)..(16): 2' fluoro-modified nucleoside
  modified_base (17)..(17): 2' O-methyl modified nucleoside
  modified_base (18)..(18): 2' fluoro-modified nucleoside
  modified_base (19)..(19): 2' O-methyl modified nucleoside
  misc_feature (19)..(20): Phosphorothioate linkage
  modified_base (20)..(20): 2' O-methyl modified nucleoside
  misc_feature (20)..(21): Phosphorothioate linkage
  modified_base (21)..(21): 2' O-methyl modified nucleoside
uagguuggagucugugcaguu

SEQ ID NO: 11374 - RNA, 21 nt, Artificial Sequence
  Description of Artificial Sequence: Synthetic oligonucleotide
  modified_base (1)..(1): 2' O-methyl modified nucleoside
  misc_feature (1)..(2): Phosphorothioate linkage
  modified_base (2)..(2): 2' fluoro-modified nucleoside
  misc_feature (2)..(3): Phosphorothioate linkage
  modified_base (3)..(3): 2' O-methyl modified nucleoside
  modified_base (4)..(4): 2' fluoro-modified nucleoside
  modified_base (5)..(5): 2' O-methyl modified nucleoside
  modified_base (6)..(6): 2' fluoro-modified nucleoside
  modified_base (7)..(7): 2' O-methyl modified nucleoside
  modified_base (8)..(8): 2' fluoro-modified nucleoside
  modified_base (9)..(9): 2' O-methyl modified nucleoside
  modified_base (10)..(10): 2' fluoro-modified nucleoside
  modified_base (11)..(11): 2' O-methyl modified nucleoside
  modified_base (12)..(12): 2' O-methyl modified nucleoside
  modified_base (13)..(13): 2' O-methyl modified nucleoside
  modified_base (14)..(14): 2' fluoro-modified nucleoside
  modified_base (15)..(15): 2' O-methyl modified nucleoside
  modified_base (16)..(16): 2' fluoro-modified nucleoside
  modified_base (17)..(17): 2' O-methyl modified nucleoside
  modified_base (18)..(18): 2' fluoro-modified nucleoside
  modified_base (19)..(19): 2' O-methyl modified nucleoside
  misc_feature (19)..(20): Phosphorothioate linkage
  modified_base (20)..(20): 2' O-methyl modified nucleoside
  misc_feature (20)..(21): Phosphorothioate linkage
  modified_base (21)..(21): 2' O-methyl modified nucleoside
ugagguuggagucugugcauu

SEQ ID NO: 11375 - RNA, 21 nt, Artificial Sequence
  Description of Artificial Sequence: Synthetic oligonucleotide
  modified_base (1)..(1): 2' O-methyl modified nucleoside
  misc_feature (1)..(2): Phosphorothioate linkage
  modified_base (2)..(2): 2' fluoro-modified nucleoside
  misc_feature (2)..(3): Phosphorothioate linkage
  modified_base (3)..(3): 2' O-methyl modified nucleoside
  modified_base (4)..(4): 2' fluoro-modified nucleoside
  modified_base (5)..(5): 2' O-methyl modified nucleoside
  modified_base (6)..(6): 2' fluoro-modified nucleoside
  modified_base (7)..(7): 2' O-methyl modified nucleoside
  modified_base (8)..(8): 2' fluoro-modified nucleoside
  modified_base (9)..(9): 2' O-methyl modified nucleoside
  modified_base (10)..(10): 2' fluoro-modified nucleoside
  modified_base (11)..(11): 2' O-methyl modified nucleoside
  modified_base (12)..(12): 2' O-methyl modified nucleoside
  modified_base (13)..(13): 2' O-methyl modified nucleoside
  modified_base (14)..(14): 2' fluoro-modified nucleoside
  modified_base (15)..(15): 2' O-methyl modified nucleoside
  modified_base (16)..(16): 2' fluoro-modified nucleoside
  modified_base (17)..(17): 2' O-methyl modified nucleoside
  modified_base (18)..(18): 2' fluoro-modified nucleoside
  modified_base (19)..(19): 2' O-methyl modified nucleoside
  misc_feature (19)..(20): Phosphorothioate linkage
  modified_base (20)..(20): 2' O-methyl modified nucleoside
  misc_feature (20)..(21): Phosphorothioate linkage
  modified_base (21)..(21): 2' O-methyl modified nucleoside
uauugagguuggagucuguuu

SEQ ID NO: 11376 - RNA, 21 nt, Artificial Sequence
  Description of Artificial Sequence: Synthetic oligonucleotide
  modified_base (1)..(1): 2' O-methyl modified nucleoside
  misc_feature (1)..(2): Phosphorothioate linkage
  modified_base (2)..(2): 2' fluoro-modified nucleoside
  misc_feature (2)..(3): Phosphorothioate linkage
  modified_base (3)..(3): 2' O-methyl modified nucleoside
  modified_base (4)..(4): 2' fluoro-modified nucleoside
  modified_base (5)..(5): 2' O-methyl modified nucleoside
  modified_base (6)..(6): 2' fluoro-modified nucleoside
  modified_base (7)..(7): 2' O-methyl modified nucleoside
  modified_base (8)..(8): 2' fluoro-modified nucleoside
  modified_base (9)..(9): 2' O-methyl modified nucleoside
  modified_base (10)..(10): 2' fluoro-modified nucleoside
  modified_base (11)..(11): 2' O-methyl modified nucleoside
  modified_base (12)..(12): 2' O-methyl modified nucleoside
  modified_base (13)..(13): 2' O-methyl modified nucleoside
  modified_base (14)..(14): 2' fluoro-modified nucleoside
  modified_base (15)..(15): 2' O-methyl modified nucleoside
  modified_base (16)..(16): 2' fluoro-modified nucleoside
  modified_base (17)..(17): 2' O-methyl modified nucleoside
  modified_base (18)..(18): 2' fluoro-modified nucleoside
  modified_base (19)..(19): 2' O-methyl modified nucleoside
  misc_feature (19)..(20): Phosphorothioate linkage
  modified_base (20)..(20): 2' O-methyl modified nucleoside
  misc_feature (20)..(21): Phosphorothioate linkage
  modified_base (21)..(21): 2' O-methyl modified nucleoside
uccaugccagccauaccaguu

SEQ ID NO: 11377 - RNA, 21 nt, Artificial Sequence
  Description of Artificial Sequence: Synthetic oligonucleotide
  modified_base (1)..(1): 2' fluoro-modified nucleoside
  misc_feature (1)..(2): Phosphorothioate linkage
  modified_base (2)..(2): 2' O-methyl modified nucleoside
  misc_feature (2)..(3): Phosphorothioate linkage
  modified_base (3)..(3): 2' fluoro-modified nucleoside
  modified_base (4)..(4): 2' O-methyl modified nucleoside
  modified_base (5)..(5): 2' fluoro-modified nucleoside
  modified_base (6)..(6): 2' O-methyl modified nucleoside
  modified_base (7)..(7): 2' fluoro-modified nucleoside
  modified_base (8)..(8): 2' fluoro-modified nucleoside
  modified_base (9)..(9): 2' fluoro-modified nucleoside
  modified_base (10)..(10): 2' O-methyl modified nucleoside
  modified_base (11)..(11): 2' fluoro-modified nucleoside
  modified_base (12)..(12): 2' O-methyl modified nucleoside
  modified_base (13)..(13): 2' fluoro-modified nucleoside
  modified_base (14)..(14): 2' O-methyl modified nucleoside
  modified_base (15)..(15): 2' fluoro-modified nucleoside
  modified_base (16)..(16): 2' O-methyl modified nucleoside
  modified_base (17)..(17): 2' fluoro-modified nucleoside
  modified_base (18)..(18): 2' O-methyl modified nucleoside
  modified_base (19)..(19): 2' fluoro-modified nucleoside
  misc_feature (19)..(20): Phosphorothioate linkage
  modified_base (20)..(20): 2' O-methyl modified nucleoside
  misc_feature (20)..(21): Phosphorothioate linkage
  modified_base (21)..(21): 2' O-methyl modified nucleoside
auauguaccaaggauguuauu

SEQ ID NO: 11378 - RNA, 21 nt, Artificial Sequence
  Description of Artificial Sequence: Synthetic oligonucleotide
  modified_base (1)..(1): 2' fluoro-modified nucleoside
  misc_feature (1)..(2): Phosphorothioate linkage
  modified_base (2)..(2): 2' O-methyl modified nucleoside
  misc_feature (2)..(3): Phosphorothioate linkage
  modified_base (3)..(3): 2' fluoro-modified nucleoside
  modified_base (4)..(4): 2' O-methyl modified nucleoside
  modified_base (5)..(5): 2' fluoro-modified nucleoside
  modified_base (6)..(6): 2' O-methyl modified nucleoside
  modified_base (7)..(7): 2' fluoro-modified nucleoside
  modified_base (8)..(8): 2' fluoro-modified nucleoside
  modified_base (9)..(9): 2' fluoro-modified nucleoside
  modified_base (10)..(10): 2' O-methyl modified nucleoside
  modified_base (11)..(11): 2' fluoro-modified nucleoside
  modified_base (12)..(12): 2' O-methyl modified nucleoside
  modified_base (13)..(13): 2' fluoro-modified nucleoside
  modified_base (14)..(14): 2' O-methyl modified nucleoside
  modified_base (15)..(15): 2' fluoro-modified nucleoside
  modified_base (16)..(16): 2' O-methyl modified nucleoside
  modified_base (17)..(17): 2' fluoro-modified nucleoside
  modified_base (18)..(18): 2' O-methyl modified nucleoside
  modified_base (19)..(19): 2' fluoro-modified nucleoside
  misc_feature (19)..(20): Phosphorothioate linkage
  modified_base (20)..(20): 2' O-methyl modified nucleoside
  misc_feature (20)..(21): Phosphorothioate linkage
  modified_base (21)..(21): 2' O-methyl modified nucleoside
uguggcccgcacggggcaauu

SEQ ID NO: 11379 - RNA, 21 nt, Artificial Sequence
  Description of Artificial Sequence: Synthetic oligonucleotide
  modified_base (1)..(1): 2' O-methyl modified nucleoside
  misc_feature (1)..(2): Phosphorothioate linkage
  modified_base (2)..(2): 2' fluoro-modified nucleoside
  misc_feature (2)..(3): Phosphorothioate linkage
  modified_base (3)..(3): 2' O-methyl modified nucleoside
  modified_base (4)..(4): 2' fluoro-modified nucleoside
  modified_base (5)..(5): 2' O-methyl modified nucleoside
  modified_base (6)..(6): 2' fluoro-modified nucleoside
  modified_base (7)..(7): 2' O-methyl modified nucleoside
  modified_base (8)..(8): 2' fluoro-modified nucleoside
  modified_base (9)..(9): 2' O-methyl modified nucleoside
  modified_base (10)..(10): 2' fluoro-modified nucleoside
  modified_base (11)..(11): 2' O-methyl modified nucleoside
  modified_base (12)..(12): 2' O-methyl modified nucleoside
  modified_base (13)..(13): 2' O-methyl modified nucleoside
  modified_base (14)..(14): 2' fluoro-modified nucleoside
  modified_base (15)..(15): 2' O-methyl modified nucleoside
  modified_base (16)..(16): 2' fluoro-modified nucleoside
  modified_base (17)..(17): 2' O-methyl modified nucleoside
  modified_base (18)..(18): 2' fluoro-modified nucleoside
  modified_base (19)..(19): 2' O-methyl modified nucleoside
  misc_feature (19)..(20): Phosphorothioate linkage
  modified_base (20)..(20): 2' O-methyl modified nucleoside
  misc_feature (20)..(21): Phosphorothioate linkage
  modified_base (21)..(21): 2' O-methyl modified nucleoside
uugccccgugcgggccacauu

SEQ ID NO: 11380 - DNA, 20 bp, Artificial Sequence
  Description of Artificial Sequence: Synthetic oligonucleotide
  modified_base (1)..(1): Any 2' O-methyl or 2'O-methoxyethyl-modified nucleoside
  misc_feature (1)..(2): Phosphorothioate linkage
  modified_base (2)..(2): Any 2' O-methyl or 2'O-methoxyethyl-modified nucleoside
  misc_feature (2)..(3): Phosphorothioate linkage
  modified_base (3)..(3): Any 2' O-methyl or 2'O-methoxyethyl-modified nucleoside
  misc_feature (3)..(4): Phosphorothioate linkage
  modified_base (4)..(4): Any 2' O-methyl or 2'O-methoxyethyl-modified nucleoside
  misc_feature (4)..(5): Phosphorothioate linkage
  modified_base (5)..(5): Any 2' O-methyl or 2'O-methoxyethyl-modified nucleoside
  misc_feature (5)..(6): Phosphorothioate linkage
  modified_base (6)..(6): Any deoxynucleotide
  misc_feature (6)..(7): Phosphorothioate linkage
  modified_base (7)..(7): Any deoxynucleotide
  misc_feature (7)..(8): Phosphorothioate linkage
  modified_base (8)..(8): Any deoxynucleotide
  misc_feature (8)..(9): Phosphorothioate linkage
  modified_base (9)..(9): Any deoxynucleotide
  misc_feature (9)..(10): Phosphorothioate linkage
  modified_base (10)..(10): Any deoxynucleotide
  misc_feature (10)..(11): Phosphorothioate linkage
  modified_base (11)..(11): Any deoxynucleotide
  misc_feature (11)..(12): Phosphorothioate linkage
  modified_base (12)..(12): Any deoxynucleotide
  misc_feature (12)..(13): Phosphorothioate linkage
  modified_base (13)..(13): Any deoxynucleotide
  misc_feature (13)..(14): Phosphorothioate linkage
  modified_base (14)..(14): Any deoxynucleotide
  misc_feature (14)..(15): Phosphorothioate linkage
  modified_base (15)..(15): Any deoxynucleotide
  misc_feature (15)..(16): Phosphorothioate linkage
  modified_base (16)..(16): Any 2' O-methyl or 2'O-methoxyethyl-modified nucleoside
  misc_feature (16)..(17): Phosphorothioate linkage
  modified_base (17)..(17): Any 2' O-methyl or 2'O-methoxyethyl-modified nucleoside
  misc_feature (17)..(18): Phosphorothioate linkage
  modified_base (18)..(18): Any 2' O-methyl or 2'O-methoxyethyl-modified nucleoside
  misc_feature (18)..(19): Phosphorothioate linkage
  modified_base (19)..(19): Any 2' O-methyl or 2'O-methoxyethyl-modified nucleoside
  misc_feature (19)..(20): Phosphorothioate linkage
  modified_base (20)..(20): Any 2' O-methyl or 2'O-methoxyethyl-modified nucleoside
nnnnnnnnnnnnnnnnnnnn

SEQ ID NO: 11381 - RNA, 21 nt, Artificial Sequence
  Description of Artificial Sequence: Synthetic oligonucleotide
  modified_base (1)..(1): Any 2' fluoro-modified nucleoside
  misc_feature (1)..(2): Phosphorothioate linkage
  modified_base (2)..(2): Any 2' O-methyl modified nucleoside
  misc_feature (2)..(3): Phosphorothioate linkage
  modified_base (3)..(3): Any 2' fluoro-modified nucleoside
  modified_base (4)..(4): Any 2' O-methyl modified nucleoside
  modified_base (5)..(5): Any 2' fluoro-modified nucleoside
  modified_base (6)..(6): Any 2' O-methyl modified nucleoside
  modified_base (7)..(7): Any 2' fluoro-modified nucleoside
  modified_base (8)..(8): Any 2' fluoro-modified nucleoside
  modified_base (9)..(9): Any 2' fluoro-modified nucleoside
  modified_base (10)..(10): Any 2' O-methyl modified nucleoside
  modified_base (11)..(11): Any 2' fluoro-modified nucleoside
  modified_base (12)..(12): Any 2' O-methyl modified nucleoside
  modified_base (13)..(13): Any 2' fluoro-modified nucleoside
  modified_base (14)..(14): Any 2' O-methyl modified nucleoside
  modified_base (15)..(15): Any 2' fluoro-modified nucleoside
  modified_base (16)..(16): Any 2' O-methyl modified nucleoside
  modified_base (17)..(17): Any 2' fluoro-modified nucleoside
  modified_base (18)..(18): Any 2' O-methyl modified nucleoside
  modified_base (19)..(19): Any 2' fluoro-modified nucleoside
  misc_feature (19)..(20): Phosphorothioate linkage
  modified_base (20)..(20): Any 2' O-methyl modified nucleoside
  misc_feature (20)..(21): Phosphorothioate linkage
  modified_base (21)..(21): Any 2' O-methyl modified nucleoside
nnnnnnnnnnnnnnnnnnnnn

SEQ ID NO: 11382 - RNA, 21 nt, Artificial Sequence
  Description of Artificial Sequence: Synthetic oligonucleotide
  modified_base (1)..(1): Any 2' O-methyl modified nucleoside
  misc_feature (1)..(2): Phosphorothioate linkage
  modified_base (2)..(2): Any 2' O-methyl modified nucleoside
  misc_feature (2)..(3): Phosphorothioate linkage
  modified_base (3)..(3): Any 2' O-methyl modified nucleoside
  modified_base (4)..(4): Any 2' O-methyl modified nucleoside
  modified_base (5)..(5): Any 2' fluoro-modified nucleoside
  modified_base (6)..(6): Any 2' O-methyl modified nucleoside
  modified_base (7)..(7): Any 2' fluoro-modified nucleoside
  modified_base (8)..(8): Any 2' fluoro-modified nucleoside
  modified_base (9)..(9): Any 2' fluoro-modified nucleoside
  modified_base (10)..(10): Any 2' O-methyl modified nucleoside
  modified_base (11)..(11): Any 2' O-methyl modified nucleoside
  modified_base (12)..(12): Any 2' O-methyl modified nucleoside
  modified_base (13)..(13): Any 2' O-methyl modified nucleoside
  modified_base (14)..(14): Any 2' O-methyl modified nucleoside
  modified_base (15)..(15): Any 2' O-methyl modified nucleoside
  modified_base (16)..(16): Any 2' O-methyl modified nucleoside
  modified_base (17)..(17): Any 2' O-methyl modified nucleoside
  modified_base (18)..(18): Any 2' O-methyl modified nucleoside
  modified_base (19)..(19): Any 2' O-methyl modified nucleoside
  misc_feature (19)..(20): Phosphorothioate linkage
  modified_base (20)..(20): Any 2' O-methyl modified nucleoside
  misc_feature (20)..(21): Phosphorothioate linkage
  modified_base (21)..(21): Any 2' O-methyl modified nucleoside
nnnnnnnnnnnnnnnnnnnnn

SEQ ID NO: 11383 - RNA, 21 nt, Artificial Sequence
  Description of Artificial Sequence: Synthetic oligonucleotide
  modified_base (1)..(1): Any 2' O-methyl modified nucleoside
  misc_feature (1)..(2): Phosphorothioate linkage
  modified_base (2)..(2): Any 2' O-methyl modified nucleoside
  misc_feature (2)..(3): Phosphorothioate linkage
  modified_base (3)..(3): Any 2' O-methyl modified nucleoside
  modified_base (4)..(4): Any 2' O-methyl modified nucleoside
  modified_base (5)..(5): Any 2' fluoro-modified nucleoside
  modified_base (6)..(6): Any 2' O-methyl modified nucleoside
  modified_base (7)..(7): Any 2' fluoro-modified nucleoside
  modified_base (8)..(8): Any 2' O-methyl modified nucleoside
  modified_base (9)..(9): Any 2' fluoro-modified nucleoside
  modified_base (10)..(10): Any 2' O-methyl modified nucleoside
  modified_base (11)..(11): Any 2' O-methyl modified nucleoside
  modified_base (12)..(12): Any 2' O-methyl modified nucleoside
  modified_base (13)..(13): Any 2' O-methyl modified nucleoside
  modified_base (14)..(14): Any 2' O-methyl modified nucleoside
  modified_base (15)..(15): Any 2' O-methyl modified nucleoside
  modified_base (16)..(16): Any 2' O-methyl modified nucleoside
  modified_base (17)..(17): Any 2' O-methyl modified nucleoside
  modified_base (18)..(18): Any 2' O-methyl modified nucleoside
  modified_base (19)..(19): Any 2' O-methyl modified nucleoside
  misc_feature (19)..(20): Phosphorothioate linkage
  modified_base (20)..(20): Any 2' O-methyl modified nucleoside
  misc_feature (20)..(21): Phosphorothioate linkage
  modified_base (21)..(21): Any 2' O-methyl modified nucleoside
nnnnnnnnnnnnnnnnnnnnn

SEQ ID NO: 11384 - RNA, 22 nt, Artificial Sequence
  Description of Artificial Sequence: Synthetic oligonucleotide
  modified_base (1)..(1): Any 2' fluoro-modified nucleoside
  misc_feature (1)..(2): Phosphorothioate linkage
  modified_base (2)..(2): Any 2' O-methyl modified nucleoside
  misc_feature (2)..(3): Phosphorothioate linkage
  modified_base (3)..(3): Any 2' fluoro-modified nucleoside
  modified_base (4)..(4): Any 2' O-methyl modified nucleoside
  modified_base (5)..(5): Any 2' fluoro-modified nucleoside
  modified_base (6)..(6): Any 2' O-methyl modified nucleoside
  modified_base (7)..(7): Any 2' fluoro-modified nucleoside
  modified_base (8)..(8): Any 2' fluoro-modified nucleoside
  modified_base (9)..(9): Any 2' fluoro-modified nucleoside
  modified_base (10)..(10): Any 2' O-methyl modified nucleoside
  modified_base (11)..(11): Any 2' fluoro-modified nucleoside
  modified_base (12)..(12): Any 2' O-methyl modified nucleoside
  modified_base (13)..(13): Any 2' fluoro-modified nucleoside
  modified_base (14)..(14): Any 2' O-methyl modified nucleoside
  modified_base (15)..(15): Any 2' fluoro-modified nucleoside
  modified_base (16)..(16): Any 2' O-methyl modified nucleoside
  modified_base (17)..(17): Any 2' fluoro-modified nucleoside
  modified_base (18)..(18): Any 2' O-methyl modified nucleoside
  modified_base (19)..(19): Any 2' fluoro-modified nucleoside
  misc_feature (19)..(20): Phosphorothioate linkage
  modified_base (20)..(20): Any 2' O-methyl modified nucleoside
  misc_feature (20)..(21): Phosphorothioate linkage
  modified_base (21)..(21): Any 2' O-methyl modified nucleoside
  modified_base (22)..(22): Any nucleoside
  See specification as filed for detailed description of substitutions and preferred embodiments
nnnnnnnnnnnnnnnnnnnnnn

SEQ ID NO: 11385 - RNA, 22 nt, Artificial Sequence
  Description of Artificial Sequence: Synthetic oligonucleotide
  modified_base (1)..(1): Any 2' O-methyl modified nucleoside
  misc_feature (1)..(2): Phosphorothioate linkage
  modified_base (2)..(2): Any 2' O-methyl modified nucleoside
  misc_feature (2)..(3): Phosphorothioate linkage
  modified_base (3)..(3): Any 2' O-methyl modified nucleoside
  modified_base (4)..(4): Any 2' O-methyl modified nucleoside
  modified_base (5)..(5): Any 2' fluoro-modified nucleoside
  modified_base (6)..(6): Any 2' O-methyl modified nucleoside
  modified_base (7)..(7): Any 2' fluoro-modified nucleoside
  modified_base (8)..(8): Any 2' fluoro-modified nucleoside
  modified_base (9)..(9): Any 2' fluoro-modified nucleoside
  modified_base (10)..(10): Any 2' O-methyl modified nucleoside
  modified_base (11)..(11): Any 2' O-methyl modified nucleoside
  modified_base (12)..(12): Any 2' O-methyl modified nucleoside
  modified_base (13)..(13): Any 2' O-methyl modified nucleoside
  modified_base (14)..(14): Any 2' O-methyl modified nucleoside
  modified_base (15)..(15): Any 2' O-methyl modified nucleoside
  modified_base (16)..(16): Any 2' O-methyl modified nucleoside
  modified_base (17)..(17): Any 2' O-methyl modified nucleoside
  modified_base (18)..(18): Any 2' O-methyl modified nucleoside
  modified_base (19)..(19): Any 2' O-methyl modified nucleoside
  misc_feature (19)..(20): Phosphorothioate linkage
  modified_base (20)..(20): Any 2' O-methyl modified nucleoside
  misc_feature (20)..(21): Phosphorothioate linkage
  modified_base (21)..(21): Any 2' O-methyl modified nucleoside
  modified_base (22)..(22): Any nucleoside
  See specification as filed for detailed description of substitutions and preferred embodiments
nnnnnnnnnnnnnnnnnnnnnn

SEQ ID NO: 11386 - RNA, 21 nt, Artificial Sequence
  Description of Artificial Sequence: Synthetic oligonucleotide
  modified_base (1)..(1): Any 2' O-methyl modified nucleoside
  misc_feature (1)..(2): Phosphorothioate linkage
  modified_base (2)..(2): Any 2' fluoro-modified nucleoside
  misc_feature (2)..(3): Phosphorothioate linkage
  modified_base (3)..(3): Any 2' O-methyl modified nucleoside
  modified_base (4)..(4): Any 2' fluoro-modified nucleoside
  modified_base (5)..(5): Any 2' O-methyl modified nucleoside
  modified_base (6)..(6): Any 2' fluoro-modified nucleoside
  modified_base (7)..(7): Any 2' O-methyl modified nucleoside
  modified_base (8)..(8): Any 2' fluoro-modified nucleoside
  modified_base (9)..(9): Any 2' O-methyl modified nucleoside
  modified_base (10)..(10): Any 2' fluoro-modified nucleoside
  modified_base (11)..(11): Any 2' O-methyl modified nucleoside
  modified_base (12)..(12): Any 2' O-methyl modified nucleoside
  modified_base (13)..(13): Any 2' O-methyl modified nucleoside
  modified_base (14)..(14): Any 2' fluoro-modified nucleoside
  modified_base (15)..(15): Any 2' O-methyl modified nucleoside
  modified_base (16)..(16): Any 2' fluoro-modified nucleoside
  modified_base (17)..(17): Any 2' O-methyl modified nucleoside
  modified_base (18)..(18): Any 2' fluoro-modified nucleoside
  modified_base (19)..(19): Any 2' O-methyl modified nucleoside
  misc_feature (19)..(20): Phosphorothioate linkage
  modified_base (20)..(20): Any 2' O-methyl modified nucleoside
  misc_feature (20)..(21): Phosphorothioate linkage
  modified_base (21)..(21): Any 2' O-methyl modified nucleoside
nnnnnnnnnnnnnnnnnnnnn

SEQ ID NO: 11387 - RNA, 21 nt, Artificial Sequence
  Description of Artificial Sequence: Synthetic oligonucleotide
  modified_base (1)..(1): Any 2' O-methyl modified nucleoside
  misc_feature (1)..(2): Phosphorothioate linkage
  modified_base (2)..(2): Any 2' fluoro-modified nucleoside
  misc_feature (2)..(3): Phosphorothioate linkage
  modified_base (3)..(3): Any 2' O-methyl modified nucleoside
  modified_base (4)..(4): Any 2' O-methyl modified nucleoside
  modified_base (5)..(5): Any 2' O-methyl modified nucleoside
  modified_base (6)..(6): Any 2' fluoro-modified nucleoside
  modified_base (7)..(7): Any 2' O-methyl modified nucleoside
  modified_base (8)..(8): Any 2' fluoro-modified nucleoside
  modified_base (9)..(9): Any 2' fluoro-modified nucleoside
  modified_base (10)..(10): Any 2' O-methyl modified nucleoside
  modified_base (11)..(11): Any 2' O-methyl modified nucleoside
  modified_base (12)..(12): Any 2' O-methyl modified nucleoside
  modified_base (13)..(13): Any 2' O-methyl modified nucleoside
  modified_base (14)..(14): Any 2' fluoro-modified nucleoside
  modified_base (15)..(15): Any 2' O-methyl modified nucleoside
  modified_base (16)..(16): Any 2' fluoro-modified nucleoside
  modified_base (17)..(17): Any 2' O-methyl modified nucleoside
  modified_base (18)..(18): Any 2' O-methyl modified nucleoside
  modified_base (19)..(19): Any 2' O-methyl modified nucleoside
  misc_feature (19)..(20): Phosphorothioate linkage
  modified_base (20)..(20): Any 2' O-methyl modified nucleoside
  misc_feature (20)..(21): Phosphorothioate linkage
  modified_base (21)..(21): Any 2' O-methyl modified nucleoside
nnnnnnnnnnnnnnnnnnnnn

SEQ ID NO: 11388 - RNA, 21 nt, Artificial Sequence
  Description of Artificial Sequence: Synthetic oligonucleotide
  modified_base (1)..(1): Any 2' O-methyl modified nucleoside
  misc_feature (1)..(2): Phosphorothioate linkage
  modified_base (2)..(2): Any 2' fluoro-modified nucleoside
  misc_feature (2)..(3): Phosphorothioate linkage
  modified_base (3)..(3): Any 2' O-methyl modified nucleoside
  modified_base (4)..(4): Any 2' O-methyl modified nucleoside
  modified_base (5)..(5): Any 2' O-methyl modified nucleoside
  modified_base (6)..(6): Any 2' fluoro-modified nucleoside
  modified_base (7)..(7): Any 2' O-methyl modified nucleoside
  modified_base (8)..(8): Any 2' O-methyl modified nucleoside
  modified_base (9)..(9): Any 2' O-methyl modified nucleoside
  modified_base (10)..(10): Any 2' O-methyl modified nucleoside
  modified_base (11)..(11): Any 2' O-methyl modified nucleoside
  modified_base (12)..(12): Any 2' O-methyl modified nucleoside
  modified_base (13)..(13): Any 2' O-methyl modified nucleoside
  modified_base (14)..(14): Any 2' fluoro-modified nucleoside
  modified_base (15)..(15): Any 2' O-methyl modified nucleoside
  modified_base (16)..(16): Any 2' fluoro-modified nucleoside
  modified_base (17)..(17): Any 2' O-methyl modified nucleoside
  modified_base (18)..(18): Any 2' O-methyl modified nucleoside
  modified_base (19)..(19): Any 2' O-methyl modified nucleoside
  misc_feature (19)..(20): Phosphorothioate linkage
  modified_base (20)..(20): Any 2' O-methyl modified nucleoside
  misc_feature (20)..(21): Phosphorothioate linkage
  modified_base (21)..(21): Any 2' O-methyl modified nucleoside
nnnnnnnnnnnnnnnnnnnnn

SEQ ID NO: 11389 - RNA, 21 nt, Artificial Sequence
  Description of Artificial Sequence: Synthetic oligonucleotide
  modified_base (1)..(1): Any 2' O-methyl modified nucleoside
  misc_feature (1)..(2): Phosphorothioate linkage
  modified_base (2)..(2): Any 2' fluoro-modified nucleoside
  misc_feature (2)..(3): Phosphorothioate linkage
  modified_base (3)..(3): Any 2' O-methyl modified nucleoside
  modified_base (4)..(4): Any 2' fluoro-modified nucleoside
  modified_base (5)..(5): Any 2' O-methyl modified nucleoside
  modified_base (6)..(6): Any 2' fluoro-modified nucleoside
  modified_base (7)..(7): Any 2' O-methyl modified nucleoside
  modified_base (8)..(8): Any 2' O-methyl modified nucleoside
  modified_base (9)..(9): Any 2' O-methyl modified nucleoside
  modified_base (10)..(10): Any 2' O-methyl modified nucleoside
  modified_base (11)..(11): Any 2' O-methyl modified nucleoside
  modified_base (12)..(12): Any 2' O-methyl modified nucleoside
  modified_base (13)..(13): Any 2' O-methyl modified nucleoside
  modified_base (14)..(14): Any 2' fluoro-modified nucleoside
  modified_base (15)..(15): Any 2' O-methyl modified nucleoside
  modified_base (16)..(16): Any 2' fluoro-modified nucleoside
  modified_base (17)..(17): Any 2' O-methyl modified nucleoside
  modified_base (18)..(18): Any 2' O-methyl modified nucleoside
  modified_base (19)..(19): Any 2' O-methyl modified nucleoside
  misc_feature (19)..(20): Phosphorothioate linkage
  modified_base (20)..(20): Any 2' O-methyl modified nucleoside
  misc_feature (20)..(21): Phosphorothioate linkage
  modified_base (21)..(21): Any 2' O-methyl modified nucleoside
nnnnnnnnnnnnnnnnnnnnn

SEQ ID NO: 11390 - protein, 16 aa, Unknown
  Description of Unknown: RFGF sequence
AAVALLPAVLLALLAP

SEQ ID NO: 11391 - protein, 11 aa, Unknown
  Description of Unknown: RFGF analogue sequence
AALLPVLLAAP

SEQ ID NO: 11392 - protein, 13 aa, Human immunodeficiency virus 1
GRKKRRQRRRPPQ

SEQ ID NO: 11393 - protein, 15 aa, Drosophila sp.
RQIKIWFQNRRMKWK

SEQ ID NO: 11394 - RNA, 21 nt, Artificial Sequence
  Description of Artificial Sequence: Synthetic oligonucleotide
  modified_base (1)..(1): Any 2' fluoro-modified nucleoside
  misc_feature (1)..(2): Phosphorothioate linkage
  modified_base (2)..(2): Any 2' O-methyl modified nucleoside
  misc_feature (2)..(3): Phosphorothioate linkage
  modified_base (3)..(3): Any 2' fluoro-modified nucleoside
  modified_base (4)..(4): Any 2' O-methyl modified nucleoside
  modified_base (5)..(5): Any 2' fluoro-modified nucleoside
  modified_base (6)..(6): Any 2' O-methyl modified nucleoside
  modified_base (7)..(7): Any 2' fluoro-modified nucleoside
  modified_base (8)..(8): Any 2' O-methyl modified nucleoside
  modified_base (9)..(9): Any 2' fluoro-modified nucleoside
  modified_base (10)..(10): Any 2' O-methyl modified nucleoside
  modified_base (11)..(11): Any 2' fluoro-modified nucleoside
  modified_base (12)..(12): Any 2' O-methyl modified nucleoside
  modified_base (13)..(13): Any 2' fluoro-modified nucleoside
  modified_base (14)..(14): Any 2' O-methyl modified nucleoside
  modified_base (15)..(15): Any 2' fluoro-modified nucleoside
  modified_base (16)..(16): Any 2' O-methyl modified nucleoside
  modified_base (17)..(17): Any 2' fluoro-modified nucleoside
  modified_base (18)..(18): Any 2' O-methyl modified nucleoside
  modified_base (19)..(19): Any 2' fluoro-modified nucleoside
  misc_feature (19)..(20): Phosphorothioate linkage
  modified_base (20)..(20): Any 2' O-methyl modified nucleoside
  misc_feature (20)..(21): Phosphorothioate linkage
  modified_base (21)..(21): Any 2' O-methyl modified nucleoside
nnnnnnnnnnnnnnnnnnnnn

SEQ ID NO: 11395 - RNA, 21 nt, Artificial Sequence
  Description of Artificial Sequence: Synthetic oligonucleotide
  modified_base (1)..(1): Any 2' fluoro-modified nucleoside
  misc_feature (1)..(2): Phosphorothioate linkage
  modified_base (2)..(2): Any 2' O-methyl modified nucleoside
  misc_feature (2)..(3): Phosphorothioate linkage
  modified_base (3)..(3): Any 2' fluoro-modified nucleoside
  modified_base (4)..(4): Any 2' O-methyl modified nucleoside
  modified_base (5)..(5): Any 2' fluoro-modified nucleoside
  modified_base (6)..(6): Any 2' O-methyl modified nucleoside
  modified_base (7)..(7): Any 2' fluoro-modified nucleoside
  modified_base (8)..(8): Any 2' O-methyl modified nucleoside
  modified_base (9)..(9): Any 2' fluoro-modified nucleoside
  modified_base (10)..(10): Any 2' O-methyl modified nucleoside
  modified_base (11)..(11): Any 2' fluoro-modified nucleoside
  modified_base (12)..(12): Any 2' O-methyl modified nucleoside
  modified_base (13)..(13): Any 2' fluoro-modified nucleoside
  modified_base (14)..(14): Any 2' O-methyl modified nucleoside
  modified_base (15)..(15): Any 2' fluoro-modified nucleoside
  modified_base (16)..(16): Any 2' O-methyl modified nucleoside
  modified_base (17)..(17): Any 2' fluoro-modified nucleoside
  modified_base (18)..(18): Any 2' O-methyl modified nucleoside
  modified_base (19)..(19): Any 2' fluoro-modified nucleoside
  misc_feature (19)..(20): Phosphorothioate linkage
  modified_base (20)..(20): Any 2' O-methyl modified nucleoside
  misc_feature (20)..(21): Phosphorothioate linkage
  modified_base (21)..(21): Any 2' O-methyl modified nucleoside
nnnnnnnnnnnnnnnnnnnnn

SEQ ID NO: 11396 - RNA, 21 nt, Artificial Sequence
  Description of Artificial Sequence: Synthetic oligonucleotide
  modified_base (1)..(1): Any 2' O-methyl modified nucleoside
  misc_feature (1)..(2): Phosphorothioate linkage
  modified_base (2)..(2): Any 2' O-methyl modified nucleoside
  misc_feature (2)..(3): Phosphorothioate linkage
  modified_base (3)..(3): Any 2' O-methyl modified nucleoside
  modified_base (4)..(4): Any 2' O-methyl modified nucleoside
  modified_base (5)..(5): Any 2' fluoro-modified nucleoside
  modified_base (6)..(6): Any 2' O-methyl modified nucleoside
  modified_base (7)..(7): Any 2' fluoro-modified nucleoside
  modified_base (8)..(8): Any 2' O-methyl modified nucleoside
  modified_base (9)..(9): Any 2' fluoro-modified nucleoside
  modified_base (10)..(10): Any 2' O-methyl modified nucleoside
  modified_base (11)..(11): Any 2' O-methyl modified nucleoside
  modified_base (12)..(12): Any 2' O-methyl modified nucleoside
  modified_base (13)..(13): Any 2' O-methyl modified nucleoside
  modified_base (14)..(14): Any 2' O-methyl modified nucleoside
  modified_base (15)..(15): Any 2' O-methyl modified nucleoside
  modified_base (16)..(16): Any 2' O-methyl modified nucleoside
  modified_base (17)..(17): Any 2' O-methyl modified nucleoside
  modified_base (18)..(18): Any 2' O-methyl modified nucleoside
  modified_base (19)..(19): Any 2' O-methyl modified nucleoside
  misc_feature (19)..(20): Phosphorothioate linkage
  modified_base (20)..(20): Any 2' O-methyl modified nucleoside
  misc_feature (20)..(21): Phosphorothioate linkage
  modified_base (21)..(21): Any 2' O-methyl modified nucleoside
nnnnnnnnnnnnnnnnnnnnn

SEQ ID NO: 11397 - RNA, 21 nt, Artificial Sequence
  Description of Artificial Sequence: Synthetic oligonucleotide
  modified_base (1)..(1): Any 2' fluoro-modified nucleoside
  misc_feature (1)..(2): Phosphorothioate linkage
  modified_base (2)..(2): Any 2' O-methyl modified nucleoside
  misc_feature (2)..(3): Phosphorothioate linkage
  modified_base (3)..(3): Any 2' fluoro-modified nucleoside
  modified_base (4)..(4): Any 2' O-methyl modified nucleoside
  modified_base (5)..(5): Any 2' fluoro-modified nucleoside
  modified_base (6)..(6): Any 2' O-methyl modified nucleoside
  modified_base (7)..(7): Any 2' fluoro-modified nucleoside
  modified_base (8)..(8): Any 2' O-methyl modified nucleoside
  modified_base (9)..(9): Any 2' fluoro-modified nucleoside
  modified_base (10)..(10): Any 2' O-methyl modified nucleoside
  modified_base (11)..(11): Any 2' fluoro-modified nucleoside
  modified_base (12)..(12): Any 2' O-methyl modified nucleoside
  modified_base (13)..(13): Any 2' fluoro-modified nucleoside
  modified_base (14)..(14): Any 2' O-methyl modified nucleoside
  modified_base (15)..(15): Any 2' fluoro-modified nucleoside
  modified_base (16)..(16): Any 2' O-methyl modified nucleoside
  modified_base (17)..(17): Any 2' fluoro-modified nucleoside
  modified_base (18)..(18): Any 2' O-methyl modified nucleoside
  modified_base (19)..(19): Any 2' fluoro-modified nucleoside
  misc_feature (19)..(20): Phosphorothioate linkage
  modified_base (20)..(20): Any 2' O-methyl modified nucleoside
  misc_feature (20)..(21): Phosphorothioate linkage
  modified_base (21)..(21): Any 2' O-methyl modified nucleoside
nnnnnnnnnnnnnnnnnnnnn

SEQ ID NO: 11398 - RNA, 21 nt, Artificial Sequence
  Description of Artificial Sequence: Synthetic oligonucleotide
  modified_base (1)..(1): Any 2' O-methyl modified nucleoside
  misc_feature (1)..(2): Phosphorothioate linkage
  modified_base (2)..(2): Any 2' O-methyl modified nucleoside
  misc_feature (2)..(3): Phosphorothioate linkage
  modified_base (3)..(3): Any 2' O-methyl modified nucleoside
  modified_base (4)..(4): Any 2' O-methyl modified nucleoside
  modified_base (5)..(5): Any 2' fluoro-modified nucleoside
  modified_base (6)..(6): Any 2' O-methyl modified nucleoside
  modified_base (7)..(7): Any 2' fluoro-modified nucleoside
  modified_base (8)..(8): Any 2' O-methyl modified nucleoside
  modified_base (9)..(9): Any 2' fluoro-modified nucleoside
  modified_base (10)..(10): Any 2' O-methyl modified nucleoside
  modified_base (11)..(11): Any 2' O-methyl modified nucleoside
  modified_base (12)..(12): Any 2' O-methyl modified nucleoside
  modified_base (13)..(13): Any 2' O-methyl modified nucleoside
  modified_base (14)..(14): Any 2' O-methyl modified nucleoside
  modified_base (15)..(15): Any 2' O-methyl modified nucleoside
  modified_base (16)..(16): Any 2' O-methyl modified nucleoside
  modified_base (17)..(17): Any 2' O-methyl modified nucleoside
  modified_base (18)..(18): Any 2' O-methyl modified nucleoside
  modified_base (19)..(19): Any 2' O-methyl modified nucleoside
  misc_feature (19)..(20): Phosphorothioate linkage
  modified_base (20)..(20): Any 2' O-methyl modified nucleoside
  misc_feature (20)..(21): Phosphorothioate linkage
  modified_base (21)..(21): Any 2' O-methyl modified nucleoside
nnnnnnnnnnnnnnnnnnnnn

SEQ ID NO: 11399 - RNA, 21 nt, Artificial Sequence
  Description of Artificial Sequence: Synthetic oligonucleotide
  modified_base (1)..(1): Any 2' O-methyl modified nucleoside
  misc_feature (1)..(2): Phosphorothioate linkage
  modified_base (2)..(2): Any 2' fluoro-modified nucleoside
  misc_feature (2)..(3): Phosphorothioate linkage
  modified_base (3)..(3): Any 2' O-methyl modified nucleoside
  modified_base (4)..(4): Any 2' fluoro-modified nucleoside
  modified_base (5)..(5): Any 2' O-methyl modified nucleoside
  modified_base (6)..(6): Any 2' fluoro-modified nucleoside
  modified_base (7)..(7): Any 2' O-methyl modified nucleoside
  modified_base (8)..(8): Any 2' fluoro-modified nucleoside
  modified_base (9)..(9): Any 2' O-methyl modified nucleoside
  modified_base (10)..(10): Any 2' fluoro-modified nucleoside
  modified_base (11)..(11): Any 2' O-methyl modified nucleoside
  modified_base (12)..(12): Any 2' fluoro-modified nucleoside
  modified_base (13)..(13): Any 2' O-methyl modified nucleoside
  modified_base (14)..(14): Any 2' fluoro-modified nucleoside
  modified_base (15)..(15): Any 2' O-methyl modified nucleoside
  modified_base (16)..(16): Any 2' fluoro-modified nucleoside
  modified_base (17)..(17): Any 2' O-methyl modified nucleoside
  modified_base (18)..(18): Any 2' fluoro-modified nucleoside
  modified_base (19)..(19): Any 2' O-methyl modified nucleoside
  misc_feature (19)..(20): Phosphorothioate linkage
  modified_base (20)..(20): Any 2' O-methyl modified nucleoside
  misc_feature (20)..(21): Phosphorothioate linkage
  modified_base (21)..(21): Any 2' O-methyl modified nucleoside
nnnnnnnnnnnnnnnnnnnnn

SEQ ID NO: 11400 - RNA, 21 nt, Artificial Sequence
  Description of Artificial Sequence: Synthetic oligonucleotide
  modified_base (1)..(1): Any 2' O-methyl modified nucleoside
  misc_feature (1)..(2): Phosphorothioate linkage
  modified_base (2)..(2): Any 2' fluoro-modified nucleoside
  misc_feature (2)..(3): Phosphorothioate linkage
  modified_base (3)..(3): Any 2' O-methyl modified nucleoside
  modified_base (4)..(4): Any 2' fluoro-modified nucleoside
  modified_base (5)..(5): Any 2' O-methyl modified nucleoside
  modified_base (6)..(6): Any 2' fluoro-modified nucleoside
  modified_base (7)..(7): Any 2' O-methyl modified nucleoside
  modified_base (8)..(8): Any 2' fluoro-modified nucleoside
  modified_base (9)..(9): Any 2' fluoro-modified nucleoside
  modified_base (10)..(10): Any 2' O-methyl modified nucleoside
  modified_base (11)..(11): Any 2' O-methyl modified nucleoside
  modified_base (12)..(12): Any 2' O-methyl modified nucleoside
  modified_base (13)..(13): Any 2' O-methyl modified nucleoside
  modified_base (14)..(14): Any 2' fluoro-modified nucleoside
  modified_base (15)..(15): Any 2' O-methyl modified nucleoside
  modified_base (16)..(16): Any 2' fluoro-modified nucleoside
  modified_base (17)..(17): Any 2' O-methyl modified nucleoside
  modified_base (18)..(18): Any 2' O-methyl modified nucleoside
  modified_base (19)..(19): Any 2' O-methyl modified nucleoside
  misc_feature (19)..(20): Phosphorothioate linkage
  modified_base (20)..(20): Any 2' O-methyl modified nucleoside
  misc_feature (20)..(21): Phosphorothioate linkage
  modified_base (21)..(21): Any 2' O-methyl modified nucleoside
nnnnnnnnnnnnnnnnnnnnn

SEQ ID NO: 11401 - RNA, 21 nt, Artificial Sequence
  Description of Artificial Sequence: Synthetic oligonucleotide
  modified_base (1)..(1): Any 2' O-methyl modified nucleoside
  misc_feature (1)..(2): Phosphorothioate linkage
  modified_base (2)..(2): Any 2' fluoro-modified nucleoside
  misc_feature (2)..(3): Phosphorothioate linkage
  modified_base (3)..(3): Any 2' O-methyl modified nucleoside
  modified_base (4)..(4): Any 2' O-methyl modified nucleoside
  modified_base (5)..(5): Any 2' O-methyl modified nucleoside
  modified_base (6)..(6): Any 2' O-methyl modified nucleoside
  modified_base (7)..(7): Any 2' O-methyl modified nucleoside
  modified_base (8)..(8): Any 2' O-methyl modified nucleoside
  modified_base (9)..(9): Any 2' O-methyl modified nucleoside
  modified_base (10)..(10): Any 2' O-methyl modified nucleoside
  modified_base (11)..(11): Any 2' O-methyl modified nucleoside
  modified_base (12)..(12): Any 2' O-methyl modified nucleoside
  modified_base (13)..(13): Any 2' O-methyl modified nucleoside
  modified_base (14)..(14): Any 2' fluoro-modified nucleoside
  modified_base (15)..(15): Any 2' O-methyl modified nucleoside
  modified_base (16)..(16): Any 2' O-methyl modified nucleoside
  modified_base (17)..(17): Any 2' O-methyl modified nucleoside
  modified_base (18)..(18): Any 2' O-methyl modified nucleoside
  modified_base (19)..(19): Any 2' O-methyl modified nucleoside
  misc_feature (19)..(20): Phosphorothioate linkage
  modified_base (20)..(20): Any 2' O-methyl modified nucleoside
  misc_feature (20)..(21): Phosphorothioate linkage
  modified_base (21)..(21): Any 2' O-methyl modified nucleoside
nnnnnnnnnnnnnnnnnnnnn

SEQ ID NO: 11402 - RNA, 21 nt, Artificial Sequence
  Description of Artificial Sequence: Synthetic oligonucleotide
  modified_base (1)..(1): 2' O-methyl modified nucleoside
  misc_feature (1)..(2): Phosphorothioate linkage
  modified_base (2)..(2): 2' O-methyl modified nucleoside
  misc_feature (2)..(3): Phosphorothioate linkage
  modified_base (3)..(3): 2' O-methyl modified nucleoside
  modified_base (4)..(4): 2' O-methyl modified nucleoside
  modified_base (5)..(5): 2' fluoro-modified nucleoside
  modified_base (6)..(6): 2' O-methyl modified nucleoside
  modified_base (7)..(7): 2' fluoro-modified nucleoside
  modified_base (8)..(8): 2' fluoro-modified nucleoside
  modified_base (9)..(9): 2' fluoro-modified nucleoside
  modified_base (10)..(10): 2' O-methyl modified nucleoside
  modified_base (11)..(11): 2' O-methyl modified nucleoside
  modified_base (12)..(12): 2' O-methyl modified nucleoside
  modified_base (13)..(13): 2' O-methyl modified nucleoside
  modified_base (14)..(14): 2' O-methyl modified nucleoside
  modified_base (15)..(15): 2' O-methyl modified nucleoside
  modified_base (16)..(16): 2' O-methyl modified nucleoside
  modified_base (17)..(17): 2' O-methyl modified nucleoside
  modified_base (18)..(18): 2' O-methyl modified nucleoside
  modified_base (19)..(19): 2' O-methyl modified nucleoside
  misc_feature (19)..(20): Phosphorothioate linkage
  modified_base (20)..(20): 2' O-methyl modified nucleoside
  misc_feature (20)..(21): Phosphorothioate linkage
  modified_base (21)..(21): 2' O-methyl modified nucleoside
aaaacaacaaaguggcgaguu

SEQ ID NO: 11403 - RNA, 21 nt, Artificial Sequence
  Description of Artificial Sequence: Synthetic oligonucleotide
  misc_feature (1)..(2): Phosphorothioate linkage
  modified_base (2)..(2): 2' O-methyl modified nucleoside
  misc_feature (2)..(3): Phosphorothioate linkage
  modified_base (3)..(3): 2' O-methyl modified nucleoside
  modified_base (4)..(4): 2' O-methyl modified nucleoside
  modified_base (5)..(5): 2' fluoro-modified nucleoside
  modified_base (6)..(6): 2' O-methyl modified nucleoside
  modified_base (7)..(7): 2' fluoro-modified nucleoside
  modified_base (8)..(8): 2' fluoro-modified nucleoside
  modified_base (9)..(9): 2' fluoro-modified nucleoside
  modified_base (10)..(10): 2' O-methyl modified nucleoside
  modified_base (11)..(11): 2' O-methyl modified nucleoside
  modified_base (12)..(12): 2' O-methyl modified nucleoside
  modified_base (13)..(13): 2' O-methyl modified nucleoside
  modified_base (14)..(14): 2' O-methyl modified nucleoside
  modified_base (15)..(15): 2' O-methyl modified nucleoside
  modified_base (16)..(16): 2' O-methyl modified nucleoside
  modified_base (17)..(17): 2' O-methyl modified nucleoside
  modified_base (18)..(18): 2' O-methyl modified nucleoside
  modified_base (19)..(19): 2' O-methyl modified nucleoside
  misc_feature (19)..(20): Phosphorothioate linkage
  modified_base (20)..(20): 2' O-methyl modified nucleoside
  misc_feature (20)..(21): Phosphorothioate linkage
  modified_base (21)..(21): 2' O-methyl modified nucleoside
cucacccaaacccacaaaauu

SEQ ID NO: 11404 - RNA, 21 nt, Artificial Sequence
  Description of Artificial Sequence: Synthetic oligonucleotide
  modified_base (1)..(1): 2' O-methyl modified nucleoside
  misc_feature (1)..(2): Phosphorothioate linkage
  modified_base (2)..(2): 2' O-methyl modified nucleoside
  misc_feature (2)..(3): Phosphorothioate linkage
  modified_base (3)..(3): 2' O-methyl modified nucleoside
  modified_base (4)..(4): 2' O-methyl modified nucleoside
  modified_base (5)..(5): 2' fluoro-modified nucleoside
  modified_base (6)..(6): 2' O-methyl modified nucleoside
  modified_base (7)..(7): 2' fluoro-modified nucleoside
  modified_base (8)..(8): 2' fluoro-modified nucleoside
  modified_base (9)..(9): 2' fluoro-modified nucleoside
  modified_base (10)..(10): 2' O-methyl modified nucleoside
  modified_base (11)..(11): 2' O-methyl modified nucleoside
  modified_base (12)..(12): 2' O-methyl modified nucleoside
  modified_base (13)..(13): 2' O-methyl modified nucleoside
  modified_base (14)..(14): 2' O-methyl modified nucleoside
  modified_base (15)..(15): 2' O-methyl modified nucleoside
  modified_base (16)..(16): 2' O-methyl modified nucleoside
  modified_base (17)..(17): 2' O-methyl modified nucleoside
  modified_base (18)..(18): 2' O-methyl modified nucleoside
  modified_base (19)..(19): 2' O-methyl modified nucleoside
  misc_feature (19)..(20): Phosphorothioate linkage
  modified_base (20)..(20): 2' O-methyl modified nucleoside
  misc_feature (20)..(21): Phosphorothioate linkage
  modified_base (21)..(21): 2' O-methyl modified nucleoside
guauaagcuuccuccugauuu

SEQ ID NO: 11405 - RNA, 21 nt, Artificial Sequence
  Description of Artificial Sequence: Synthetic oligonucleotide
  modified_base (1)..(1): 2' O-methyl modified nucleoside
  misc_feature (1)..(2): Phosphorothioate linkage
  modified_base (2)..(2): 2' O-methyl modified nucleoside
  misc_feature (2)..(3): Phosphorothioate linkage
  modified_base (3)..(3): 2' O-methyl modified nucleoside
  modified_base (4)..(4): 2' O-methyl modified nucleoside
  modified_base (5)..(5): 2' fluoro-modified nucleoside
  modified_base (6)..(6): 2' O-methyl modified nucleoside
  modified_base (7)..(7): 2' fluoro-modified nucleoside
  modified_base (8)..(8): 2' fluoro-modified nucleoside
  modified_base (9)..(9): 2' fluoro-modified nucleoside
  modified_base (10)..(10): 2' O-methyl modified nucleoside
  modified_base (11)..(11): 2' O-methyl modified nucleoside
  modified_base (12)..(12): 2' O-methyl modified nucleoside
  modified_base (13)..(13): 2' O-methyl modified nucleoside
  modified_base (14)..(14): 2' O-methyl modified nucleoside
  modified_base (15)..(15): 2' O-methyl modified nucleoside
  modified_base (16)..(16): 2' O-methyl modified nucleoside
  modified_base (17)..(17): 2' O-methyl modified nucleoside
  modified_base (18)..(18): 2' O-methyl modified nucleoside
  modified_base (19)..(19): 2' O-methyl modified nucleoside
  misc_feature (19)..(20): Phosphorothioate linkage
  modified_base (20)..(20): 2' O-methyl modified nucleoside
  misc_feature (20)..(21): Phosphorothioate linkage
  modified_base (21)..(21): 2' O-methyl modified nucleoside
cugaguauagccacuuuguuu

SEQ ID NO: 11406 - RNA, 21 nt, Artificial Sequence
  Description of Artificial Sequence: Synthetic oligonucleotide
  modified_base (1)..(1): 2' O-methyl modified nucleoside
  misc_feature (1)..(2): Phosphorothioate linkage
  modified_base (2)..(2): 2' O-methyl modified nucleoside
  misc_feature (2)..(3): Phosphorothioate linkage
  modified_base (3)..(3): 2' O-methyl modified nucleoside
  modified_base (4)..(4): 2' O-methyl modified nucleoside
  modified_base (5)..(5): 2' fluoro-modified nucleoside
  modified_base (6)..(6): 2' O-methyl modified nucleoside
  modified_base (7)..(7): 2' fluoro-modified nucleoside
  modified_base (8)..(8): 2' fluoro-modified nucleoside
  modified_base (9)..(9): 2' fluoro-modified nucleoside
  modified_base (10)..(10): 2' O-methyl modified nucleoside
  modified_base (11)..(11): 2' O-methyl modified nucleoside
  modified_base (12)..(12): 2' O-methyl modified nucleoside
  modified_base (13)..(13): 2' O-methyl modified nucleoside
  modified_base (14)..(14): 2' O-methyl modified nucleoside
  modified_base (15)..(15): 2' O-methyl modified nucleoside
  modified_base (16)..(16): 2' O-methyl modified nucleoside
  modified_base (17)..(17): 2' O-methyl modified nucleoside
  modified_base (18)..(18): 2' O-methyl modified nucleoside
  modified_base (19)..(19): 2' O-methyl modified nucleoside
  misc_feature (19)..(20): Phosphorothioate linkage
  modified_base (20)..(20): 2' O-methyl modified nucleoside
  misc_feature (20)..(21): Phosphorothioate linkage
  modified_base (21)..(21): 2' O-methyl modified nucleoside
uugggcaaugaacucaacauu

SEQ ID NO: 11407 - RNA, 21 nt, Artificial Sequence
  Description of Artificial Sequence: Synthetic oligonucleotide
  modified_base (1)..(1): 2' O-methyl modified nucleoside
  misc_feature (1)..(2): Phosphorothioate linkage
  modified_base (2)..(2): 2' O-methyl modified nucleoside
  misc_feature (2)..(3): Phosphorothioate linkage
  modified_base (3)..(3): 2' O-methyl modified nucleoside
  modified_base (4)..(4): 2' O-methyl modified nucleoside
  modified_base (5)..(5): 2' fluoro-modified nucleoside
  modified_base (6)..(6): 2' O-methyl modified nucleoside
  modified_base (7)..(7): 2' fluoro-modified nucleoside
  modified_base (8)..(8): 2' fluoro-modified nucleoside
  modified_base (9)..(9): 2' fluoro-modified nucleoside
  modified_base (10)..(10): 2' O-methyl modified nucleoside
  modified_base (11)..(11): 2' O-methyl modified nucleoside
  modified_base (12)..(12): 2' O-methyl modified nucleoside
  modified_base (13)..(13): 2' O-methyl modified nucleoside
  modified_base (14)..(14): 2' O-methyl modified nucleoside
  modified_base (15)..(15): 2' O-methyl modified nucleoside
  modified_base (16)..(16): 2' O-methyl modified nucleoside
  modified_base (17)..(17): 2' O-methyl modified nucleoside
  modified_base (18)..(18): 2' O-methyl modified nucleoside
  modified_base (19)..(19): 2' O-methyl modified nucleoside
  misc_feature (19)..(20): Phosphorothioate linkage
  modified_base (20)..(20): 2' O-methyl modified nucleoside
  misc_feature (20)..(21): Phosphorothioate linkage
  modified_base (21)..(21): 2' O-methyl modified nucleoside
cauaacaacacagccuucauu

SEQ ID NO: 11408 - RNA, 21 nt, Artificial Sequence
  Description of Artificial Sequence: Synthetic oligonucleotide
  modified_base (1)..(1): 2' O-methyl modified nucleoside
  misc_feature (1)..(2): Phosphorothioate linkage
  modified_base (2)..(2): 2' O-methyl modified nucleoside
  misc_feature (2)..(3): Phosphorothioate linkage
  modified_base (3)..(3): 2' O-methyl modified nucleoside
  modified_base (4)..(4): 2' O-methyl modified nucleoside
  modified_base (5)..(5): 2' fluoro-modified nucleoside
  modified_base (6)..(6): 2' O-methyl modified nucleoside
  modified_base (7)..(7): 2' fluoro-modified nucleoside
  modified_base (8)..(8): 2' fluoro-modified nucleoside
  modified_base (9)..(9): 2' fluoro-modified nucleoside
  modified_base (10)..(10): 2' O-methyl modified nucleoside
  modified_base (11)..(11): 2' O-methyl modified nucleoside
  modified_base (12)..(12): 2' O-methyl modified nucleoside
  modified_base (13)..(13): 2' O-methyl modified nucleoside
  modified_base (14)..(14): 2' O-methyl modified nucleoside
  modified_base (15)..(15): 2' O-methyl modified nucleoside
  modified_base (16)..(16): 2' O-methyl modified nucleoside
  modified_base (17)..(17): 2' O-methyl modified nucleoside
  modified_base (18)..(18): 2' O-methyl modified nucleoside
  modified_base (19)..(19): 2' O-methyl modified nucleoside
  misc_feature (19)..(20): Phosphorothioate linkage
  modified_base (20)..(20): 2' O-methyl modified nucleoside
  misc_feature (20)..(21): Phosphorothioate linkage
  modified_base (21)..(21): 2' O-methyl modified nucleoside
uauguaccaaggauguuacuu

SEQ ID NO: 11409 - RNA, 21 nt, Artificial Sequence
  Description of Artificial Sequence: Synthetic oligonucleotide
  modified_base (1)..(1): 2' O-methyl modified nucleoside
  misc_feature (1)..(2): Phosphorothioate linkage
  modified_base (2)..(2): 2' O-methyl modified nucleoside
  misc_feature (2)..(3): Phosphorothioate linkage
  modified_base (3)..(3): 2' O-methyl modified nucleoside
  modified_base (4)..(4): 2' O-methyl modified nucleoside
  modified_base (5)..(5): 2' fluoro-modified nucleoside
  modified_base (6)..(6): 2' O-methyl modified nucleoside
  modified_base (7)..(7): 2' fluoro-modified nucleoside
  modified_base (8)..(8): 2' fluoro-modified nucleoside
  modified_base (9)..(9): 2' fluoro-modified nucleoside
  modified_base (10)..(10): 2' O-methyl modified nucleoside
  modified_base (11)..(11): 2' O-methyl modified nucleoside
  modified_base (12)..(12): 2' O-methyl modified nucleoside
  modified_base (13)..(13): 2' O-methyl modified nucleoside
  modified_base (14)..(14): 2' O-methyl modified nucleoside
  modified_base (15)..(15): 2' O-methyl modified nucleoside
  modified_base (16)..(16): 2' O-methyl modified nucleoside
  modified_base (17)..(17): 2' O-methyl modified nucleoside
  modified_base (18)..(18): 2' O-methyl modified nucleoside
  modified_base (19)..(19): 2' O-methyl modified nucleoside
  misc_feature (19)..(20): Phosphorothioate linkage
  modified_base (20)..(20): 2' O-methyl modified nucleoside
  misc_feature (20)..(21): Phosphorothioate linkage
  modified_base (21)..(21): 2' O-methyl modified nucleoside
uaccaaggauguuacaguauu

SEQ ID NO: 11410 - RNA, 21 nt, Artificial Sequence
  Description of Artificial Sequence: Synthetic oligonucleotide
  modified_base (1)..(1): 2' O-methyl modified nucleoside
  misc_feature (1)..(2): Phosphorothioate linkage
  modified_base (2)..(2): 2' O-methyl modified nucleoside
  misc_feature (2)..(3): Phosphorothioate linkage
  modified_base (3)..(3): 2' O-methyl modified nucleoside
  modified_base (4)..(4): 2' O-methyl modified nucleoside
  modified_base (5)..(5): 2' fluoro-modified nucleoside
  modified_base (6)..(6): 2' O-methyl modified nucleoside
  modified_base (7)..(7): 2' fluoro-modified nucleoside
  modified_base (8)..(8): 2' fluoro-modified nucleoside
  modified_base (9)..(9): 2' fluoro-modified nucleoside
  modified_base (10)..(10): 2' O-methyl modified nucleoside
  modified_base (11)..(11): 2' O-methyl modified nucleoside
  modified_base (12)..(12): 2' O-methyl modified nucleoside
  modified_base (13)..(13): 2' O-methyl modified nucleoside
  modified_base (14)..(14): 2' O-methyl modified nucleoside
  modified_base (15)..(15): 2' O-methyl modified nucleoside
  modified_base (16)..(16): 2' O-methyl modified nucleoside
  modified_base (17)..(17): 2' O-methyl modified nucleoside
  modified_base (18)..(18): 2' O-methyl modified nucleoside
  modified_base (19)..(19): 2' O-methyl modified nucleoside
  misc_feature (19)..(20): Phosphorothioate linkage
  modified_base (20)..(20): 2' O-methyl modified nucleoside
  misc_feature (20)..(21): Phosphorothioate linkage
  modified_base (21)..(21): 2' O-methyl modified nucleoside
gauguuacaguaaacaggauu

SEQ ID NO: 11411 - RNA, 21 nt, Artificial Sequence
  Description of Artificial Sequence: Synthetic oligonucleotide
  modified_base (1)..(1): 2' O-methyl modified nucleoside
  misc_feature (1)..(2): Phosphorothioate linkage
  modified_base (2)..(2): 2' O-methyl modified nucleoside
  misc_feature (2)..(3): Phosphorothioate linkage
  modified_base (3)..(3): 2' O-methyl modified nucleoside
  modified_base (4)..(4): 2' O-methyl modified nucleoside
  modified_base (5)..(5): 2' fluoro-modified nucleoside
  modified_base (6)..(6): 2' O-methyl modified nucleoside
  modified_base (7)..(7): 2' fluoro-modified nucleoside
  modified_base (8)..(8): 2' fluoro-modified nucleoside
  modified_base (9)..(9): 2' fluoro-modified nucleoside
  modified_base (10)..(10): 2' O-methyl modified nucleoside
  modified_base (11)..(11): 2' O-methyl modified nucleoside
  modified_base (12)..(12): 2' O-methyl modified nucleoside
  modified_base (13)..(13): 2' O-methyl modified nucleoside
  modified_base (14)..(14): 2' O-methyl modified nucleoside
  modified_base (15)..(15): 2' O-methyl modified nucleoside
  modified_base (16)..(16): 2' O-methyl modified nucleoside
  modified_base (17)..(17): 2' O-methyl modified nucleoside
  modified_base (18)..(18): 2' O-methyl modified nucleoside
  modified_base (19)..(19): 2' O-methyl modified nucleoside
  misc_feature (19)..(20): Phosphorothioate linkage
  modified_base (20)..(20): 2' O-methyl modified nucleoside
  misc_feature (20)..(21): Phosphorothioate linkage
  modified_base (21)..(21): 2' O-methyl modified nucleoside
uguuacaguaaacaggauguu

SEQ ID NO: 11412 - RNA, 21 nt, Artificial Sequence
  Description of Artificial Sequence: Synthetic oligonucleotide
  modified_base (1)..(1): 2' O-methyl modified nucleoside
  misc_feature (1)..(2): Phosphorothioate linkage
  modified_base (2)..(2): 2' O-methyl modified nucleoside
  misc_feature (2)..(3): Phosphorothioate linkage
  modified_base (3)..(3): 2' O-methyl modified nucleoside
  modified_base (4)..(4): 2' O-methyl modified nucleoside
  modified_base (5)..(5): 2' fluoro-modified nucleoside
  modified_base (6)..(6): 2' O-methyl modified nucleoside
  modified_base (7)..(7): 2' fluoro-modified nucleoside
  modified_base (8)..(8): 2' fluoro-modified nucleoside
  modified_base (9)..(9): 2' fluoro-modified nucleoside
  modified_base (10)..(10): 2' O-methyl modified nucleoside
  modified_base (11)..(11): 2' O-methyl modified nucleoside
  modified_base (12)..(12): 2' O-methyl modified nucleoside
  modified_base (13)..(13): 2' O-methyl modified nucleoside
  modified_base (14)..(14): 2' O-methyl modified nucleoside
  modified_base (15)..(15): 2' O-methyl modified nucleoside
  modified_base (16)..(16): 2' O-methyl modified nucleoside
  modified_base (17)..(17): 2' O-methyl modified nucleoside
  modified_base (18)..(18): 2' O-methyl modified nucleoside
  modified_base (19)..(19): 2' O-methyl modified nucleoside
  misc_feature (19)..(20): Phosphorothioate linkage
  modified_base (20)..(20): 2' O-methyl modified nucleoside
  misc_feature (20)..(21): Phosphorothioate linkage
  modified_base (21)..(21): 2' O-methyl modified nucleoside
ugcuaaaaagaaccauauuuu

SEQ ID NO: 11413 - RNA, 21 nt, Artificial Sequence
  Description of Artificial Sequence: Synthetic oligonucleotide
  modified_base (1)..(1): 2' O-methyl modified nucleoside
  misc_feature (1)..(2): Phosphorothioate linkage
  modified_base (2)..(2): 2' O-methyl modified nucleoside
  misc_feature (2)..(3): Phosphorothioate linkage
  modified_base (3)..(3): 2' O-methyl modified nucleoside
  modified_base (4)..(4): 2' O-methyl modified nucleoside
  modified_base (5)..(5): 2' fluoro-modified nucleoside
  modified_base (6)..(6): 2' O-methyl modified nucleoside
  modified_base (7)..(7): 2' fluoro-modified nucleoside
  modified_base (8)..(8): 2' fluoro-modified nucleoside
  modified_base (9)..(9): 2' fluoro-modified nucleoside
  modified_base (10)..(10): 2' O-methyl modified nucleoside
  modified_base (11)..(11): 2' O-methyl modified nucleoside
  modified_base (12)..(12): 2' O-methyl modified nucleoside
  modified_base (13)..(13): 2' O-methyl modified nucleoside
  modified_base (14)..(14): 2' O-methyl modified nucleoside
  modified_base (15)..(15): 2' O-methyl modified nucleoside
  modified_base (16)..(16): 2' O-methyl modified nucleoside
  modified_base (17)..(17): 2' O-methyl modified nucleoside
  modified_base (18)..(18): 2' O-methyl modified nucleoside
  modified_base (19)..(19): 2' O-methyl modified nucleoside
  misc_feature (19)..(20): Phosphorothioate linkage
  modified_base (20)..(20): 2' O-methyl modified nucleoside
  misc_feature (20)..(21): Phosphorothioate linkage
  modified_base (21)..(21): 2' O-methyl modified nucleoside
ggccuuugaguguuagagauu

SEQ ID NO: 11414 - RNA, 21 nt, Artificial Sequence
  Description of Artificial Sequence: Synthetic oligonucleotide
  modified_base (1)..(1): 2' O-methyl modified nucleoside
  misc_feature (1)..(2): Phosphorothioate linkage
  modified_base (2)..(2): 2' O-methyl modified nucleoside
  misc_feature (2)..(3): Phosphorothioate linkage
  modified_base (3)..(3): 2' O-methyl modified nucleoside
  modified_base (4)..(4): 2' O-methyl modified nucleoside
  modified_base (5)..(5): 2' fluoro-modified nucleoside
  modified_base (6)..(6): 2' O-methyl modified nucleoside
  modified_base (7)..(7): 2' fluoro-modified nucleoside
  modified_base (8)..(8): 2' fluoro-modified nucleoside
  modified_base (9)..(9): 2' fluoro-modified nucleoside
  modified_base (10)..(10): 2' O-methyl modified nucleoside
  modified_base (11)..(11): 2' O-methyl modified nucleoside
  modified_base (12)..(12): 2' O-methyl modified nucleoside
  modified_base (13)..(13): 2' O-methyl modified nucleoside
  modified_base (14)..(14): 2' O-methyl modified nucleoside
  modified_base (15)..(15): 2' O-methyl modified nucleoside
  modified_base (16)..(16): 2' O-methyl modified nucleoside
  modified_base (17)..(17): 2' O-methyl modified nucleoside
  modified_base (18)..(18): 2' O-methyl modified nucleoside
  modified_base (19)..(19): 2' O-methyl modified nucleoside
  misc_feature (19)..(20): Phosphorothioate linkage
  modified_base (20)..(20): 2' O-methyl modified nucleoside
  misc_feature (20)..(21): Phosphorothioate linkage
  modified_base (21)..(21): 2' O-methyl modified nucleoside
ggcacaaaacugccuuaaauu

SEQ ID NO: 11415 - RNA, 21 nt, Artificial Sequence
  Description of Artificial Sequence: Synthetic oligonucleotide
  modified_base (1)..(1): 2' O-methyl modified nucleoside
  misc_feature (1)..(2): Phosphorothioate linkage
  modified_base (2)..(2): 2' O-methyl modified nucleoside
  misc_feature (2)..(3): Phosphorothioate linkage
  modified_base (3)..(3): 2' O-methyl modified nucleoside
  modified_base (4)..(4): 2' O-methyl modified nucleoside
  modified_base (5)..(5): 2' fluoro-modified nucleoside
  modified_base (6)..(6): 2' O-methyl modified nucleoside
  modified_base (7)..(7): 2' fluoro-modified nucleoside
  modified_base (8)..(8): 2' fluoro-modified nucleoside
  modified_base (9)..(9): 2' fluoro-modified nucleoside
  modified_base (10)..(10): 2' O-methyl modified nucleoside
  modified_base (11)..(11): 2' O-methyl modified nucleoside
  modified_base (12)..(12): 2' O-methyl modified nucleoside
  modified_base (13)..(13): 2' O-methyl modified nucleoside
  modified_base (14)..(14): 2' O-methyl modified nucleoside
  modified_base (15)..(15): 2' O-methyl modified nucleoside
  modified_base (16)..(16): 2' O-methyl modified nucleoside
  modified_base (17)..(17): 2' O-methyl modified nucleoside
  modified_base (18)..(18): 2' O-methyl modified nucleoside
  modified_base (19)..(19): 2' O-methyl modified nucleoside
  misc_feature (19)..(20): Phosphorothioate linkage
  modified_base (20)..(20): 2' O-methyl modified nucleoside
  misc_feature (20)..(21): Phosphorothioate linkage
  modified_base (21)..(21): 2' O-methyl modified nucleoside
guaagaaacaagcucaagguu

SEQ ID NO: 11416 - RNA, 21 nt, Artificial Sequence
  Description of Artificial Sequence: Synthetic oligonucleotide
  modified_base (1)..(1): 2' O-methyl modified nucleoside
  misc_feature (1)..(2): Phosphorothioate linkage
  modified_base (2)..(2): 2' O-methyl modified nucleoside
  misc_feature (2)..(3): Phosphorothioate linkage
  modified_base (3)..(3): 2' O-methyl modified nucleoside
  modified_base (4)..(4): 2' O-methyl modified nucleoside
  modified_base (5)..(5): 2' fluoro-modified nucleoside
  modified_base (6)..(6): 2' O-methyl modified nucleoside
  modified_base (7)..(7): 2' fluoro-modified nucleoside
  modified_base (8)..(8): 2' fluoro-modified nucleoside
  modified_base (9)..(9): 2' fluoro-modified nucleoside
  modified_base (10)..(10): 2' O-methyl modified nucleoside
  modified_base (11)..(11): 2' O-methyl modified nucleoside
  modified_base (12)..(12): 2' O-methyl modified nucleoside
  modified_base (13)..(13): 2' O-methyl modified nucleoside
  modified_base (14)..(14): 2' O-methyl modified nucleoside
  modified_base (15)..(15): 2' O-methyl modified nucleoside
  modified_base (16)..(16): 2' O-methyl modified nucleoside
  modified_base (17)..(17): 2' O-methyl modified nucleoside
  modified_base (18)..(18): 2' O-methyl modified nucleoside
  modified_base (19)..(19): 2' O-methyl modified nucleoside
  misc_feature (19)..(20): Phosphorothioate linkage
  modified_base (20)..(20): 2' O-methyl modified nucleoside
  misc_feature (20)..(21): Phosphorothioate linkage
  modified_base (21)..(21): 2' O-methyl modified nucleoside
aaaacugaagguagaugguuu

SEQ ID NO: 11417 - RNA, 21 nt, Artificial Sequence
  Description of Artificial Sequence: Synthetic oligonucleotide
  modified_base (1)..(1): 2' O-methyl modified nucleoside
  misc_feature (1)..(2): Phosphorothioate linkage
  modified_base (2)..(2): 2' O-methyl modified nucleoside
  misc_feature (2)..(3): Phosphorothioate linkage
  modified_base (3)..(3): 2' O-methyl modified nucleoside
  modified_base (4)..(4): 2' O-methyl modified nucleoside
  modified_base (5)..(5): 2' fluoro-modified nucleoside
  modified_base (6)..(6): 2' O-methyl modified nucleoside
  modified_base (7)..(7): 2' fluoro-modified nucleoside
  modified_base (8)..(8): 2' fluoro-modified nucleoside
  modified_base (9)..(9): 2' fluoro-modified nucleoside
  modified_base (10)..(10): 2' O-methyl modified nucleoside
  modified_base (11)..(11): 2' O-methyl modified nucleoside
  modified_base (12)..(12): 2' O-methyl modified nucleoside
  modified_base (13)..(13): 2' O-methyl modified nucleoside
  modified_base (14)..(14): 2' O-methyl modified nucleoside
  modified_base (15)..(15): 2' O-methyl modified nucleoside
  modified_base (16)..(16): 2' O-methyl modified nucleoside
  modified_base (17)..(17): 2' O-methyl modified nucleoside
  modified_base (18)..(18): 2' O-methyl modified nucleoside
  modified_base (19)..(19): 2' O-methyl modified nucleoside
  misc_feature (19)..(20): Phosphorothioate linkage
  modified_base (20)..(20): 2' O-methyl modified nucleoside
  misc_feature (20)..(21): Phosphorothioate linkage
  modified_base (21)..(21): 2' O-methyl modified nucleoside
aacugaagguagaugguguuu

SEQ ID NO: 11418 - RNA, 21 nt, Artificial Sequence
  Description of Artificial Sequence: Synthetic oligonucleotide
  modified_base (1)..(1): 2' O-methyl modified nucleoside
  misc_feature (1)..(2): Phosphorothioate linkage
  modified_base (2)..(2): 2' O-methyl modified nucleoside
  misc_feature (2)..(3): Phosphorothioate linkage
  modified_base (3)..(3): 2' O-methyl modified nucleoside
  modified_base (4)..(4): 2' O-methyl modified nucleoside
  modified_base (5)..(5): 2' fluoro-modified nucleoside
  modified_base (6)..(6): 2' O-methyl modified nucleoside
  modified_base (7)..(7): 2' fluoro-modified nucleoside
  modified_base (8)..(8): 2' fluoro-modified nucleoside
  modified_base (9)..(9): 2' fluoro-modified nucleoside
  modified_base (10)..(10): 2' O-methyl modified nucleoside
  modified_base (11)..(11): 2' O-methyl modified nucleoside
  modified_base (12)..(12): 2' O-methyl modified nucleoside
  modified_base (13)..(13): 2' O-methyl modified nucleoside
  modified_base (14)..(14): 2' O-methyl modified nucleoside
  modified_base (15)..(15): 2' O-methyl modified nucleoside
  modified_base (16)..(16): 2' O-methyl modified nucleoside
  modified_base (17)..(17): 2' O-methyl modified nucleoside
  modified_base (18)..(18): 2' O-methyl modified nucleoside
  modified_base (19)..(19): 2' O-methyl modified nucleoside
  misc_feature (19)..(20): Phosphorothioate linkage
  modified_base (20)..(20): 2' O-methyl modified nucleoside
  misc_feature (20)..(21): Phosphorothioate linkage
  modified_base (21)..(21): 2' O-methyl modified nucleoside
augguguuauaguuaauaauu

SEQ ID NO: 11419 - RNA, 21 nt, Artificial Sequence
  Description of Artificial Sequence: Synthetic oligonucleotide
  modified_base (1)..(1): 2' O-methyl modified nucleoside
  misc_feature (1)..(2): Phosphorothioate linkage
  modified_base (2)..(2): 2' O-methyl modified nucleoside
  misc_feature (2)..(3): Phosphorothioate linkage
  modified_base (3)..(3): 2' O-methyl modified nucleoside
  modified_base (4)..(4): 2' O-methyl modified nucleoside
  modified_base (5)..(5): 2' fluoro-modified nucleoside
  modified_base (6)..(6): 2' O-methyl modified nucleoside
  modified_base (7)..(7): 2' fluoro-modified nucleoside
  modified_base (8)..(8): 2' fluoro-modified nucleoside
  modified_base (9)..(9): 2' fluoro-modified nucleoside
  modified_base (10)..(10): 2' O-methyl modified nucleoside
  modified_base (11)..(11): 2' O-methyl modified nucleoside
  modified_base (12)..(12): 2' O-methyl modified nucleoside
  modified_base (13)..(13): 2' O-methyl modified nucleoside
  modified_base (14)..(14): 2' O-methyl modified nucleoside
  modified_base (15)..(15): 2' O-methyl modified nucleoside
  modified_base (16)..(16): 2' O-methyl modified nucleoside
  modified_base (17)..(17): 2' O-methyl modified nucleoside
  modified_base (18)..(18): 2' O-methyl modified nucleoside
  modified_base (19)..(19): 2' O-methyl modified nucleoside
  misc_feature (19)..(20): Phosphorothioate linkage
  modified_base (20)..(20): 2' O-methyl modified nucleoside
  misc_feature (20)..(21): Phosphorothioate linkage
  modified_base (21)..(21): 2' O-methyl modified nucleoside
uuuccuucuacaauaaacauu

SEQ ID NO: 11420 - RNA, 21 nt, Artificial Sequence
  Description of Artificial Sequence: Synthetic oligonucleotide
  modified_base (1)..(1): 2' O-methyl modified nucleoside
  misc_feature (1)..(2): Phosphorothioate linkage
  modified_base (2)..(2): 2' O-methyl modified nucleoside
  misc_feature (2)..(3): Phosphorothioate linkage
  modified_base (3)..(3): 2' O-methyl modified nucleoside
  modified_base (4)..(4): 2' O-methyl modified nucleoside
  modified_base (5)..(5): 2' fluoro-modified nucleoside
  modified_base (6)..(6): 2' O-methyl modified nucleoside
  modified_base (7)..(7): 2' fluoro-modified nucleoside
  modified_base (8)..(8): 2' fluoro-modified nucleoside
  modified_base (9)..(9): 2' fluoro-modified nucleoside
  modified_base (10)..(10): 2' O-methyl modified nucleoside
  modified_base (11)..(11): 2' O-methyl modified nucleoside
  modified_base (12)..(12): 2' O-methyl modified nucleoside
  modified_base (13)..(13): 2' O-methyl modified nucleoside
  modified_base (14)..(14): 2' O-methyl modified nucleoside
  modified_base (15)..(15): 2' O-methyl modified nucleoside
  modified_base (16)..(16): 2' O-methyl modified nucleoside
  modified_base (17)..(17): 2' O-methyl modified nucleoside
  modified_base (18)..(18): 2' O-methyl modified nucleoside
  modified_base (19)..(19): 2' O-methyl modified nucleoside
  misc_feature (19)..(20): Phosphorothioate linkage
  modified_base (20)..(20): 2' O-methyl modified nucleoside
  misc_feature (20)..(21): Phosphorothioate linkage
  modified_base (21)..(21): 2' O-methyl modified nucleoside
caaugaacucaacagcuauuu

SEQ ID NO: 11421 - RNA, 21 nt, Artificial Sequence
  Description of Artificial Sequence: Synthetic oligonucleotide
  modified_base (1)..(1): 2' O-methyl modified nucleoside
  misc_feature (1)..(2): Phosphorothioate linkage
  modified_base (2)..(2): 2' O-methyl modified nucleoside
  misc_feature (2)..(3): Phosphorothioate linkage
  modified_base (3)..(3): 2' O-methyl modified nucleoside
  modified_base (4)..(4): 2' O-methyl modified nucleoside
  modified_base (5)..(5): 2' fluoro-modified nucleoside
  modified_base (6)..(6): 2' O-methyl modified nucleoside
  modified_base (7)..(7): 2' fluoro-modified nucleoside
  modified_base (8)..(8): 2' fluoro-modified nucleoside
  modified_base (9)..(9): 2' fluoro-modified nucleoside
  modified_base (10)..(10): 2' O-methyl modified nucleoside
  modified_base (11)..(11): 2' O-methyl modified nucleoside
  modified_base (12)..(12): 2' O-methyl modified nucleoside
  modified_base (13)..(13): 2' O-methyl modified nucleoside
  modified_base (14)..(14): 2' O-methyl modified nucleoside
  modified_base (15)..(15): 2' O-methyl modified nucleoside
  modified_base (16)..(16): 2' O-methyl modified nucleoside
  modified_base (17)..(17): 2' O-methyl modified nucleoside
  modified_base (18)..(18): 2' O-methyl modified nucleoside
  modified_base (19)..(19): 2' O-methyl modified nucleoside
  misc_feature (19)..(20): Phosphorothioate linkage
  modified_base (20)..(20): 2' O-methyl modified nucleoside
  misc_feature (20)..(21): Phosphorothioate linkage
  modified_base (21)..(21): 2' O-methyl modified nucleoside
ugaaauuaucuugagucuauu

SEQ ID NO: 11422 - RNA, 21 nt, Artificial Sequence
  Description of Artificial Sequence: Synthetic oligonucleotide
  modified_base (1)..(1): 2' O-methyl modified nucleoside
  misc_feature (1)..(2): Phosphorothioate linkage
  modified_base (2)..(2): 2' fluoro-modified nucleoside
  misc_feature (2)..(3): Phosphorothioate linkage
  modified_base (3)..(3): 2' O-methyl modified nucleoside
  modified_base (4)..(4): 2' O-methyl modified nucleoside
  modified_base (5)..(5): 2' O-methyl modified nucleoside
  modified_base (6)..(6): 2' fluoro-modified nucleoside
  modified_base (7)..(7): 2' O-methyl modified nucleoside
  modified_base (8)..(8): 2' O-methyl modified nucleoside
  modified_base (9)..(9): 2' O-methyl modified nucleoside
  modified_base (10)..(10): 2' O-methyl modified nucleoside
  modified_base (11)..(11): 2' O-methyl modified nucleoside
  modified_base (12)..(12): 2' O-methyl modified nucleoside
  modified_base (13)..(13): 2' O-methyl modified nucleoside
  modified_base (14)..(14): 2' fluoro-modified nucleoside
  modified_base (15)..(15): 2' O-methyl modified nucleoside
  modified_base (16)..(16): 2' fluoro-modified nucleoside
  modified_base (17)..(17): 2' O-methyl modified nucleoside
  modified_base (18)..(18): 2' O-methyl modified nucleoside
  modified_base (19)..(19): 2' O-methyl modified nucleoside
  misc_feature (19)..(20): Phosphorothioate linkage
  modified_base (20)..(20): 2' O-methyl modified nucleoside
  misc_feature (20)..(21): Phosphorothioate linkage
  modified_base (21)..(21): 2' O-methyl modified nucleoside
cucgccacuuuguuguuuuuu

SEQ ID NO: 11423 - RNA, 21 nt, Artificial Sequence
  Description of Artificial Sequence: Synthetic oligonucleotide
  modified_base (1)..(1): 2' O-methyl modified nucleoside
  misc_feature (1)..(2): Phosphorothioate linkage
  modified_base (2)..(2): 2' fluoro-modified nucleoside
  misc_feature (2)..(3): Phosphorothioate linkage
  modified_base (3)..(3): 2' O-methyl modified nucleoside
  modified_base (4)..(4): 2' O-methyl modified nucleoside
  modified_base (5)..(5): 2' O-methyl modified nucleoside
  modified_base (6)..(6): 2' fluoro-modified nucleoside
  modified_base (7)..(7): 2' O-methyl modified nucleoside
  modified_base (8)..(8): 2' O-methyl modified nucleoside
  modified_base (9)..(9): 2' O-methyl modified nucleoside
  modified_base (10)..(10): 2' O-methyl modified nucleoside
  modified_base (11)..(11): 2' O-methyl modified nucleoside
  modified_base (12)..(12): 2' O-methyl modified nucleoside
  modified_base (13)..(13): 2' O-methyl modified nucleoside
  modified_base (14)..(14): 2' fluoro-modified nucleoside
  modified_base (15)..(15): 2' O-methyl modified nucleoside
  modified_base (16)..(16): 2' fluoro-modified nucleoside
  modified_base (17)..(17): 2' O-methyl modified nucleoside
  modified_base (18)..(18): 2' O-methyl modified nucleoside
  modified_base (19)..(19): 2' O-methyl modified nucleoside
  misc_feature (19)..(20): Phosphorothioate linkage
  modified_base (20)..(20): 2' O-methyl modified nucleoside
  misc_feature (20)..(21): Phosphorothioate linkage
  modified_base (21)..(21): 2' O-methyl modified nucleoside
uuuuguggguuugggugaguu

SEQ ID NO: 11424 - RNA, 21 nt, Artificial Sequence
  Description of Artificial Sequence: Synthetic oligonucleotide
  modified_base (1)..(1): 2' O-methyl modified nucleoside
  misc_feature (1)..(2): Phosphorothioate linkage
  modified_base (2)..(2): 2' fluoro-modified nucleoside
  misc_feature (2)..(3): Phosphorothioate linkage
  modified_base (3)..(3): 2' O-methyl modified nucleoside
  modified_base (4)..(4): 2' O-methyl modified nucleoside
  modified_base (5)..(5): 2' O-methyl modified nucleoside
  modified_base (6)..(6): 2' fluoro-modified nucleoside
  modified_base (7)..(7): 2' O-methyl modified nucleoside
  modified_base (8)..(8): 2' O-methyl modified nucleoside
  modified_base (9)..(9): 2' O-methyl modified nucleoside
  modified_base (10)..(10): 2' O-methyl modified nucleoside
  modified_base (11)..(11): 2' O-methyl modified nucleoside
  modified_base (12)..(12): 2' O-methyl modified nucleoside
  modified_base (13)..(13): 2' O-methyl modified nucleoside
  modified_base (14)..(14): 2' fluoro-modified nucleoside
  modified_base (15)..(15): 2' O-methyl modified nucleoside
  modified_base (16)..(16): 2' fluoro-modified nucleoside
  modified_base (17)..(17): 2' O-methyl modified nucleoside
  modified_base (18)..(18): 2' O-methyl modified nucleoside
  modified_base (19)..(19): 2' O-methyl modified nucleoside
  misc_feature (19)..(20): Phosphorothioate linkage
  modified_base (20)..(20): 2' O-methyl modified nucleoside
  misc_feature (20)..(21): Phosphorothioate linkage
  modified_base (21)..(21): 2' O-methyl modified nucleoside
aucaggaggaagcuuauacuu

SEQ ID NO: 11425 - RNA, 21 nt, Artificial Sequence
  Description of Artificial Sequence: Synthetic oligonucleotide
  modified_base (1)..(1): 2' O-methyl modified nucleoside
  misc_feature (1)..(2): Phosphorothioate linkage
  modified_base (2)..(2): 2' fluoro-modified nucleoside
  misc_feature (2)..(3): Phosphorothioate linkage
  modified_base (3)..(3): 2' O-methyl modified nucleoside
  modified_base (4)..(4): 2' O-methyl modified nucleoside
  modified_base (5)..(5): 2' O-methyl modified nucleoside
  modified_base (6)..(6): 2' fluoro-modified nucleoside
  modified_base (7)..(7): 2' O-methyl modified nucleoside
  modified_base (8)..(8): 2' O-methyl modified nucleoside
  modified_base (9)..(9): 2' O-methyl modified nucleoside
  modified_base (10)..(10): 2' O-methyl modified nucleoside
  modified_base (11)..(11): 2' O-methyl modified nucleoside
  modified_base (12)..(12): 2' O-methyl modified nucleoside
  modified_base (13)..(13): 2' O-methyl modified nucleoside
  modified_base (14)..(14): 2' fluoro-modified nucleoside
  modified_base (15)..(15): 2' O-methyl modified nucleoside
  modified_base (16)..(16): 2' fluoro-modified nucleoside
  modified_base (17)..(17): 2' O-methyl modified nucleoside
  modified_base (18)..(18): 2' O-methyl modified nucleoside
  modified_base (19)..(19): 2' O-methyl modified nucleoside
  misc_feature (19)..(20): Phosphorothioate linkage
  modified_base (20)..(20): 2' O-methyl modified nucleoside
  misc_feature (20)..(21): Phosphorothioate linkage
  modified_base (21)..(21): 2' O-methyl modified nucleoside
acaaaguggcuauacucaguu

SEQ ID NO: 11426 - RNA, 21 nt, Artificial Sequence
  Description of Artificial Sequence: Synthetic oligonucleotide
  modified_base (1)..(1): 2' O-methyl modified nucleoside
  misc_feature (1)..(2): Phosphorothioate linkage
  modified_base (2)..(2): 2' fluoro-modified nucleoside
  misc_feature (2)..(3): Phosphorothioate linkage
  modified_base (3)..(3): 2' O-methyl modified nucleoside
  modified_base (4)..(4): 2' O-methyl modified nucleoside
  modified_base (5)..(5): 2' O-methyl modified nucleoside
  modified_base (6)..(6): 2' fluoro-modified nucleoside
  modified_base (7)..(7): 2' O-methyl modified nucleoside
  modified_base (8)..(8): 2' O-methyl modified nucleoside
  modified_base (9)..(9): 2' O-methyl modified nucleoside
  modified_base (10)..(10): 2' O-methyl modified nucleoside
  modified_base (11)..(11): 2' O-methyl modified nucleoside
  modified_base (12)..(12): 2' O-methyl modified nucleoside
  modified_base (13)..(13): 2' O-methyl modified nucleoside
  modified_base (14)..(14): 2' fluoro-modified nucleoside
  modified_base (15)..(15): 2' O-methyl modified nucleoside
  modified_base (16)..(16): 2' fluoro-modified nucleoside
  modified_base (17)..(17): 2' O-methyl modified nucleoside
  modified_base (18)..(18): 2' O-methyl modified nucleoside
  modified_base (19)..(19): 2' O-methyl modified nucleoside
  misc_feature (19)..(20): Phosphorothioate linkage
  modified_base (20)..(20): 2' O-methyl modified nucleoside
  misc_feature (20)..(21): Phosphorothioate linkage
  modified_base (21)..(21): 2' O-methyl modified nucleoside
uguugaguucauugcccaauu

SEQ ID NO: 11427 - RNA, 21 nt, Artificial Sequence
  Description of Artificial Sequence: Synthetic oligonucleotide
  modified_base (1)..(1): 2' O-methyl modified nucleoside
  misc_feature (1)..(2): Phosphorothioate linkage
  modified_base (2)..(2): 2' fluoro-modified nucleoside
  misc_feature (2)..(3): Phosphorothioate linkage
  modified_base (3)..(3): 2' O-methyl modified nucleoside
  modified_base (4)..(4): 2' O-methyl modified nucleoside
  modified_base (5)..(5): 2' O-methyl modified nucleoside
  modified_base (6)..(6): 2' fluoro-modified nucleoside
  modified_base (7)..(7): 2' O-methyl modified nucleoside
  modified_base (8)..(8): 2' O-methyl modified nucleoside
  modified_base (9)..(9): 2' O-methyl modified nucleoside
  modified_base (10)..(10): 2' O-methyl modified nucleoside
  modified_base (11)..(11): 2' O-methyl modified nucleoside
  modified_base (12)..(12): 2' O-methyl modified nucleoside
  modified_base (13)..(13): 2' O-methyl modified nucleoside
  modified_base (14)..(14): 2' fluoro-modified nucleoside
  modified_base (15)..(15): 2' O-methyl modified nucleoside
  modified_base (16)..(16): 2' fluoro-modified nucleoside
  modified_base (17)..(17): 2' O-methyl modified nucleoside
  modified_base (18)..(18): 2' O-methyl modified nucleoside
  modified_base (19)..(19): 2' O-methyl modified nucleoside
  misc_feature (19)..(20): Phosphorothioate linkage
  modified_base (20)..(20): 2' O-methyl modified nucleoside
  misc_feature (20)..(21): Phosphorothioate linkage
  modified_base (21)..(21): 2' O-methyl modified nucleoside
ugaaggcuguguuguuauguu

SEQ ID NO: 11428 - RNA, 21 nt, Artificial Sequence
  Description of Artificial Sequence: Synthetic oligonucleotide
  modified_base (1)..(1): 2' O-methyl modified nucleoside
  misc_feature (1)..(2): Phosphorothioate linkage
  modified_base (2)..(2): 2' fluoro-modified nucleoside
  misc_feature (2)..(3): Phosphorothioate linkage
  modified_base (3)..(3): 2' O-methyl modified nucleoside
  modified_base (4)..(4): 2' O-methyl modified nucleoside
  modified_base (5)..(5): 2' O-methyl modified nucleoside
  modified_base (6)..(6): 2' fluoro-modified nucleoside
  modified_base (7)..(7): 2' O-methyl modified nucleoside
  modified_base (8)..(8): 2' O-methyl modified nucleoside
  modified_base (9)..(9): 2' O-methyl modified nucleoside
  modified_base (10)..(10): 2' O-methyl modified nucleoside
  modified_base (11)..(11): 2' O-methyl modified nucleoside
  modified_base (12)..(12): 2' O-methyl modified nucleoside
  modified_base (13)..(13): 2' O-methyl modified nucleoside
  modified_base (14)..(14): 2' fluoro-modified nucleoside
  modified_base (15)..(15): 2' O-methyl modified nucleoside
  modified_base (16)..(16): 2' fluoro-modified nucleoside
  modified_base (17)..(17): 2' O-methyl modified nucleoside
  modified_base (18)..(18): 2' O-methyl modified nucleoside
  modified_base (19)..(19): 2' O-methyl modified nucleoside
  misc_feature (19)..(20): Phosphorothioate linkage
  modified_base (20)..(20): 2' O-methyl modified nucleoside
  misc_feature (20)..(21): Phosphorothioate linkage
  modified_base (21)..(21): 2' O-methyl modified nucleoside
guaacauccuugguacauauu

SEQ ID NO: 11429 - RNA, 21 nt, Artificial Sequence
  Description of Artificial Sequence: Synthetic oligonucleotide
  modified_base (1)..(1): 2' O-methyl modified nucleoside
  misc_feature (1)..(2): Phosphorothioate linkage
  modified_base (2)..(2): 2' fluoro-modified nucleoside
  misc_feature (2)..(3): Phosphorothioate linkage
  modified_base (3)..(3): 2' O-methyl modified nucleoside
  modified_base (4)..(4): 2' O-methyl modified nucleoside
  modified_base (5)..(5): 2' O-methyl modified nucleoside
  modified_base (6)..(6): 2' fluoro-modified nucleoside
  modified_base (7)..(7): 2' O-methyl modified nucleoside
  modified_base (8)..(8): 2' O-methyl modified nucleoside
  modified_base (9)..(9): 2' O-methyl modified nucleoside
  modified_base (10)..(10): 2' O-methyl modified nucleoside
  modified_base (11)..(11): 2' O-methyl modified nucleoside
  modified_base (12)..(12): 2' O-methyl modified nucleoside
  modified_base (13)..(13): 2' O-methyl modified nucleoside
  modified_base (14)..(14): 2' fluoro-modified nucleoside
  modified_base (15)..(15): 2' O-methyl modified nucleoside
  modified_base (16)..(16): 2' fluoro-modified nucleoside
  modified_base (17)..(17): 2' O-methyl modified nucleoside
  modified_base (18)..(18): 2' O-methyl modified nucleoside
  modified_base (19)..(19): 2' O-methyl modified nucleoside
  misc_feature (19)..(20): Phosphorothioate linkage
  modified_base (20)..(20): 2' O-methyl modified nucleoside
  misc_feature (20)..(21): Phosphorothioate linkage
  modified_base (21)..(21): 2' O-methyl modified nucleoside
uacuguaacauccuugguauu

SEQ ID NO: 11430 - RNA, 21 nt, Artificial Sequence
  Description of Artificial Sequence: Synthetic oligonucleotide
  modified_base (1)..(1): 2' O-methyl modified nucleoside
  misc_feature (1)..(2): Phosphorothioate linkage
  modified_base (2)..(2): 2' fluoro-modified nucleoside
  misc_feature (2)..(3): Phosphorothioate linkage
  modified_base (3)..(3): 2' O-methyl modified nucleoside
  modified_base (4)..(4): 2' O-methyl modified nucleoside
  modified_base (5)..(5): 2' O-methyl modified nucleoside
  modified_base (6)..(6): 2' fluoro-modified nucleoside
  modified_base (7)..(7): 2' O-methyl modified nucleoside
  modified_base (8)..(8): 2' O-methyl modified nucleoside
  modified_base (9)..(9): 2' O-methyl modified nucleoside
  modified_base (10)..(10): 2' O-methyl modified nucleoside
  modified_base (11)..(11): 2' O-methyl modified nucleoside
  modified_base (12)..(12): 2' O-methyl modified nucleoside
  modified_base (13)..(13): 2' O-methyl modified nucleoside
  modified_base (14)..(14): 2' fluoro-modified nucleoside
  modified_base (15)..(15): 2' O-methyl modified nucleoside
  modified_base (16)..(16): 2' fluoro-modified nucleoside
  modified_base (17)..(17): 2' O-methyl modified nucleoside
  modified_base (18)..(18): 2' O-methyl modified nucleoside
  modified_base (19)..(19): 2' O-methyl modified nucleoside
  misc_feature (19)..(20): Phosphorothioate linkage
  modified_base (20)..(20): 2' O-methyl modified nucleoside
  misc_feature (20)..(21): Phosphorothioate linkage
  modified_base (21)..(21): 2' O-methyl modified nucleoside
uccuguuuacuguaacaucuu

SEQ ID NO: 11431 - RNA, 21 nt, Artificial Sequence
  Description of Artificial Sequence: Synthetic oligonucleotide
  modified_base (1)..(1): 2' O-methyl modified nucleoside
  misc_feature (1)..(2): Phosphorothioate linkage
  modified_base (2)..(2): 2' fluoro-modified nucleoside
  misc_feature (2)..(3): Phosphorothioate linkage
  modified_base (3)..(3): 2' O-methyl modified nucleoside
  modified_base (4)..(4): 2' O-methyl modified nucleoside
  modified_base (5)..(5): 2' O-methyl modified nucleoside
  modified_base (6)..(6): 2' fluoro-modified nucleoside
  modified_base (7)..(7): 2' O-methyl modified nucleoside
  modified_base (8)..(8): 2' O-methyl modified nucleoside
  modified_base (9)..(9): 2' O-methyl modified nucleoside
  modified_base (10)..(10): 2' O-methyl modified nucleoside
  modified_base (11)..(11): 2' O-methyl modified nucleoside
  modified_base (12)..(12): 2' O-methyl modified nucleoside
  modified_base (13)..(13): 2' O-methyl modified nucleoside
  modified_base (14)..(14): 2' fluoro-modified nucleoside
  modified_base (15)..(15): 2' O-methyl modified nucleoside
  modified_base (16)..(16): 2' fluoro-modified nucleoside
  modified_base (17)..(17): 2' O-methyl modified nucleoside
  modified_base (18)..(18): 2' O-methyl modified nucleoside
  modified_base (19)..(19): 2' O-methyl modified nucleoside
  misc_feature (19)..(20): Phosphorothioate linkage
  modified_base (20)..(20): 2' O-methyl modified nucleoside
  misc_feature (20)..(21): Phosphorothioate linkage
  modified_base (21)..(21): 2' O-methyl modified nucleoside
cauccuguuuacuguaacauu

SEQ ID NO: 11432 - RNA, 21 nt, Artificial Sequence
  Description of Artificial Sequence: Synthetic oligonucleotide
  modified_base (1)..(1): 2' O-methyl modified nucleoside
  misc_feature (1)..(2): Phosphorothioate linkage
  modified_base (2)..(2): 2' fluoro-modified nucleoside
  misc_feature (2)..(3): Phosphorothioate linkage
  modified_base (3)..(3): 2' O-methyl modified nucleoside
  modified_base (4)..(4): 2' O-methyl modified nucleoside
  modified_base (5)..(5): 2' O-methyl modified nucleoside
  modified_base (6)..(6): 2' fluoro-modified nucleoside
  modified_base (7)..(7): 2' O-methyl modified nucleoside
  modified_base (8)..(8): 2' O-methyl modified nucleoside
  modified_base (9)..(9): 2' O-methyl modified nucleoside
  modified_base (10)..(10): 2' O-methyl modified nucleoside
  modified_base (11)..(11): 2' O-methyl modified nucleoside
  modified_base (12)..(12): 2' O-methyl modified nucleoside
  modified_base (13)..(13): 2' O-methyl modified nucleoside
  modified_base (14)..(14): 2' fluoro-modified nucleoside
  modified_base (15)..(15): 2' O-methyl modified nucleoside
  modified_base (16)..(16): 2' fluoro-modified nucleoside
  modified_base (17)..(17): 2' O-methyl modified nucleoside
  modified_base (18)..(18): 2' O-methyl modified nucleoside
  modified_base (19)..(19): 2' O-methyl modified nucleoside
  misc_feature (19)..(20): Phosphorothioate linkage
  modified_base (20)..(20): 2' O-methyl modified nucleoside
  misc_feature (20)..(21): Phosphorothioate linkage
  modified_base (21)..(21): 2' O-methyl modified nucleoside
aauaugguucuuuuuagcauu

SEQ ID NO: 11433 - RNA, 21 nt, Artificial Sequence
  Description of Artificial Sequence: Synthetic oligonucleotide
  modified_base (1)..(1): 2' O-methyl modified nucleoside
  misc_feature (1)..(2): Phosphorothioate linkage
  modified_base (2)..(2): 2' fluoro-modified nucleoside
  misc_feature (2)..(3): Phosphorothioate linkage
  modified_base (3)..(3): 2' O-methyl modified nucleoside
  modified_base (4)..(4): 2' O-methyl modified nucleoside
  modified_base (5)..(5): 2' O-methyl modified nucleoside
  modified_base (6)..(6): 2' fluoro-modified nucleoside
  modified_base (7)..(7): 2' O-methyl modified nucleoside
  modified_base (8)..(8): 2' O-methyl modified nucleoside
  modified_base (9)..(9): 2' O-methyl modified nucleoside
  modified_base (10)..(10): 2' O-methyl modified nucleoside
  modified_base (11)..(11): 2' O-methyl modified nucleoside
  modified_base (12)..(12): 2' O-methyl modified nucleoside
  modified_base (13)..(13): 2' O-methyl modified nucleoside
  modified_base (14)..(14): 2' fluoro-modified nucleoside
  modified_base (15)..(15): 2' O-methyl modified nucleoside
  modified_base (16)..(16): 2' fluoro-modified nucleoside
  modified_base (17)..(17): 2' O-methyl modified nucleoside
  modified_base (18)..(18): 2' O-methyl modified nucleoside
  modified_base (19)..(19): 2' O-methyl modified nucleoside
  misc_feature (19)..(20): Phosphorothioate linkage
  modified_base (20)..(20): 2' O-methyl modified nucleoside
  misc_feature (20)..(21): Phosphorothioate linkage
  modified_base (21)..(21): 2' O-methyl modified nucleoside
ucucuaacacucaaaggccuu

SEQ ID NO: 11434 - RNA, 21 nt, Artificial Sequence
  Description of Artificial Sequence: Synthetic oligonucleotide
  modified_base (1)..(1): 2' O-methyl modified nucleoside
  misc_feature (1)..(2): Phosphorothioate linkage
  modified_base (2)..(2): 2' fluoro-modified nucleoside
  misc_feature (2)..(3): Phosphorothioate linkage
  modified_base (3)..(3): 2' O-methyl modified nucleoside
  modified_base (4)..(4): 2' O-methyl modified nucleoside
  modified_base (5)..(5): 2' O-methyl modified nucleoside
  modified_base (6)..(6): 2' fluoro-modified nucleoside
  modified_base (7)..(7): 2' O-methyl modified nucleoside
  modified_base (8)..(8): 2' O-methyl modified nucleoside
  modified_base (9)..(9): 2' O-methyl modified nucleoside
  modified_base (10)..(10): 2' O-methyl modified nucleoside
  modified_base (11)..(11): 2' O-methyl modified nucleoside
  modified_base (12)..(12): 2' O-methyl modified nucleoside
  modified_base (13)..(13): 2' O-methyl modified nucleoside
  modified_base (14)..(14): 2' fluoro-modified nucleoside
  modified_base (15)..(15): 2' O-methyl modified nucleoside
  modified_base (16)..(16): 2' fluoro-modified nucleoside
  modified_base (17)..(17): 2' O-methyl modified nucleoside
  modified_base (18)..(18): 2' O-methyl modified nucleoside
  modified_base (19)..(19): 2' O-methyl modified nucleoside
  misc_feature (19)..(20): Phosphorothioate linkage
  modified_base (20)..(20): 2' O-methyl modified nucleoside
  misc_feature (20)..(21): Phosphorothioate linkage
  modified_base (21)..(21): 2' O-methyl modified nucleoside
uuuaaggcaguuuugugccuu

SEQ ID NO: 11435 - RNA, 21 nt, Artificial Sequence
  Description of Artificial Sequence: Synthetic oligonucleotide
  modified_base (1)..(1): 2' O-methyl modified nucleoside
  misc_feature (1)..(2): Phosphorothioate linkage
  modified_base (2)..(2): 2' fluoro-modified nucleoside
  misc_feature (2)..(3): Phosphorothioate linkage
  modified_base (3)..(3): 2' O-methyl modified nucleoside
  modified_base (4)..(4): 2' O-methyl modified nucleoside
  modified_base (5)..(5): 2' O-methyl modified nucleoside
  modified_base (6)..(6): 2' fluoro-modified nucleoside
  modified_base (7)..(7): 2' O-methyl modified nucleoside
  modified_base (8)..(8): 2' O-methyl modified nucleoside
  modified_base (9)..(9): 2' O-methyl modified nucleoside
  modified_base (10)..(10): 2' O-methyl modified nucleoside
  modified_base (11)..(11): 2' O-methyl modified nucleoside
  modified_base (12)..(12): 2' O-methyl modified nucleoside
  modified_base (13)..(13): 2' O-methyl modified nucleoside
  modified_base (14)..(14): 2' fluoro-modified nucleoside
  modified_base (15)..(15): 2' O-methyl modified nucleoside
  modified_base (16)..(16): 2' fluoro-modified nucleoside
  modified_base (17)..(17): 2' O-methyl modified nucleoside
  modified_base (18)..(18): 2' O-methyl modified nucleoside
  modified_base (19)..(19): 2' O-methyl modified nucleoside
  misc_feature (19)..(20): Phosphorothioate linkage
  modified_base (20)..(20): 2' O-methyl modified nucleoside
  misc_feature (20)..(21): Phosphorothioate linkage
  modified_base (21)..(21): 2' O-methyl modified nucleoside
ccuugagcuuguuucuuacuu

SEQ ID NO: 11436 - RNA, 21 nt, Artificial Sequence
  Description of Artificial Sequence: Synthetic oligonucleotide
  modified_base (1)..(1): 2' O-methyl modified nucleoside
  misc_feature (1)..(2): Phosphorothioate linkage
  modified_base (2)..(2): 2' fluoro-modified nucleoside
  misc_feature (2)..(3): Phosphorothioate linkage
  modified_base (3)..(3): 2' O-methyl modified nucleoside
  modified_base (4)..(4): 2' O-methyl modified nucleoside
  modified_base (5)..(5): 2' O-methyl modified nucleoside
  modified_base (6)..(6): 2' fluoro-modified nucleoside
  modified_base (7)..(7): 2' O-methyl modified nucleoside
  modified_base (8)..(8): 2' O-methyl modified nucleoside
  modified_base (9)..(9): 2' O-methyl modified nucleoside
  modified_base (10)..(10): 2' O-methyl modified nucleoside
  modified_base (11)..(11): 2' O-methyl modified nucleoside
  modified_base (12)..(12): 2' O-methyl modified nucleoside
  modified_base (13)..(13): 2' O-methyl modified nucleoside
  modified_base (14)..(14): 2' fluoro-modified nucleoside
  modified_base (15)..(15): 2' O-methyl modified nucleoside
  modified_base (16)..(16): 2' fluoro-modified nucleoside
  modified_base (17)..(17): 2' O-methyl modified nucleoside
  modified_base (18)..(18): 2' O-methyl modified nucleoside
  modified_base (19)..(19): 2' O-methyl modified nucleoside
  misc_feature (19)..(20): Phosphorothioate linkage
  modified_base (20)..(20): 2' O-methyl modified nucleoside
  misc_feature (20)..(21): Phosphorothioate linkage
  modified_base (21)..(21): 2' O-methyl modified nucleoside
accaucuaccuucaguuuuuu

SEQ ID NO: 11437 - RNA, 21 nt, Artificial Sequence
  Description of Artificial Sequence: Synthetic oligonucleotide
  modified_base (1)..(1): 2' O-methyl modified nucleoside
  misc_feature (1)..(2): Phosphorothioate linkage
  modified_base (2)..(2): 2' fluoro-modified nucleoside
  misc_feature (2)..(3): Phosphorothioate linkage
  modified_base (3)..(3): 2' O-methyl modified nucleoside
  modified_base (4)..(4): 2' O-methyl modified nucleoside
  modified_base (5)..(5): 2' O-methyl modified nucleoside
  modified_base (6)..(6): 2' fluoro-modified nucleoside
  modified_base (7)..(7): 2' O-methyl modified nucleoside
  modified_base (8)..(8): 2' O-methyl modified nucleoside
  modified_base (9)..(9): 2' O-methyl modified nucleoside
  modified_base (10)..(10): 2' O-methyl modified nucleoside
  modified_base (11)..(11): 2' O-methyl modified nucleoside
  modified_base (12)..(12): 2' O-methyl modified nucleoside
  modified_base (13)..(13): 2' O-methyl modified nucleoside
  modified_base (14)..(14): 2' fluoro-modified nucleoside
  modified_base (15)..(15): 2' O-methyl modified nucleoside
  modified_base (16)..(16): 2' fluoro-modified nucleoside
  modified_base (17)..(17): 2' O-methyl modified nucleoside
  modified_base (18)..(18): 2' O-methyl modified nucleoside
  modified_base (19)..(19): 2' O-methyl modified nucleoside
  misc_feature (19)..(20): Phosphorothioate linkage
  modified_base (20)..(20): 2' O-methyl modified nucleoside
  misc_feature (20)..(21): Phosphorothioate linkage
  modified_base (21)..(21): 2' O-methyl modified nucleoside
acaccaucuaccuucaguuuu

SEQ ID NO: 11438 - RNA, 21 nt, Artificial Sequence
  Description of Artificial Sequence: Synthetic oligonucleotide
  modified_base (1)..(1): 2' O-methyl modified nucleoside
  misc_feature (1)..(2): Phosphorothioate linkage
  modified_base (2)..(2): 2' fluoro-modified nucleoside
  misc_feature (2)..(3): Phosphorothioate linkage
  modified_base (3)..(3): 2' O-methyl modified nucleoside
  modified_base (4)..(4): 2' O-methyl modified nucleoside
  modified_base (5)..(5): 2' O-methyl modified nucleoside
  modified_base (6)..(6): 2' fluoro-modified nucleoside
  modified_base (7)..(7): 2' O-methyl modified nucleoside
  modified_base (8)..(8): 2' O-methyl modified nucleoside
  modified_base (9)..(9): 2' O-methyl modified nucleoside
  modified_base (10)..(10): 2' O-methyl modified nucleoside
  modified_base (11)..(11): 2' O-methyl modified nucleoside
  modified_base (12)..(12): 2' O-methyl modified nucleoside
  modified_base (13)..(13): 2' O-methyl modified nucleoside
  modified_base (14)..(14): 2' fluoro-modified nucleoside
  modified_base (15)..(15): 2' O-methyl modified nucleoside
  modified_base (16)..(16): 2' fluoro-modified nucleoside
  modified_base (17)..(17): 2' O-methyl modified nucleoside
  modified_base (18)..(18): 2' O-methyl modified nucleoside
  modified_base (19)..(19): 2' O-methyl modified nucleoside
  misc_feature (19)..(20): Phosphorothioate linkage
  modified_base (20)..(20): 2' O-methyl modified nucleoside
  misc_feature (20)..(21): Phosphorothioate linkage
  modified_base (21)..(21): 2' O-methyl modified nucleoside
uuauuaacuauaacaccauuu

SEQ ID NO: 11439 - RNA, 21 nt, Artificial Sequence
  Description of Artificial Sequence: Synthetic oligonucleotide
  modified_base (1)..(1): 2' O-methyl modified nucleoside
  misc_feature (1)..(2): Phosphorothioate linkage
  modified_base (2)..(2): 2' fluoro-modified nucleoside
  misc_feature (2)..(3): Phosphorothioate linkage
  modified_base (3)..(3): 2' O-methyl modified nucleoside
  modified_base (4)..(4): 2' O-methyl modified nucleoside
  modified_base (5)..(5): 2' O-methyl modified nucleoside
  modified_base (6)..(6): 2' fluoro-modified nucleoside
  modified_base (7)..(7): 2' O-methyl modified nucleoside
  modified_base (8)..(8): 2' O-methyl modified nucleoside
  modified_base (9)..(9): 2' O-methyl modified nucleoside
  modified_base (10)..(10): 2' O-methyl modified nucleoside
  modified_base (11)..(11): 2' O-methyl modified nucleoside
  modified_base (12)..(12): 2' O-methyl modified nucleoside
  modified_base (13)..(13): 2' O-methyl modified nucleoside
  modified_base (14)..(14): 2' fluoro-modified nucleoside
  modified_base (15)..(15): 2' O-methyl modified nucleoside
  modified_base (16)..(16): 2' fluoro-modified nucleoside
  modified_base (17)..(17): 2' O-methyl modified nucleoside
  modified_base (18)..(18): 2' O-methyl modified nucleoside
  modified_base (19)..(19): 2' O-methyl modified nucleoside
  misc_feature (19)..(20): Phosphorothioate linkage
  modified_base (20)..(20): 2' O-methyl modified nucleoside
  misc_feature (20)..(21): Phosphorothioate linkage
  modified_base (21)..(21): 2' O-methyl modified nucleoside
uguuuauuguagaaggaaauu

SEQ ID NO: 11440 - RNA, 21 nt, Artificial Sequence
  Description of Artificial Sequence: Synthetic oligonucleotide
  modified_base (1)..(1): 2' O-methyl modified nucleoside
  misc_feature (1)..(2): Phosphorothioate linkage
  modified_base (2)..(2): 2' fluoro-modified nucleoside
  misc_feature (2)..(3): Phosphorothioate linkage
  modified_base (3)..(3): 2' O-methyl modified nucleoside
  modified_base (4)..(4): 2' O-methyl modified nucleoside
  modified_base (5)..(5): 2' O-methyl modified nucleoside
  modified_base (6)..(6): 2' fluoro-modified nucleoside
  modified_base (7)..(7): 2' O-methyl modified nucleoside
  modified_base (8)..(8): 2' O-methyl modified nucleoside
  modified_base (9)..(9): 2' O-methyl modified nucleoside
  modified_base (10)..(10): 2' O-methyl modified nucleoside
  modified_base (11)..(11): 2' O-methyl modified nucleoside
  modified_base (12)..(12): 2' O-methyl modified nucleoside
  modified_base (13)..(13): 2' O-methyl modified nucleoside
  modified_base (14)..(14): 2' fluoro-modified nucleoside
  modified_base (15)..(15): 2' O-methyl modified nucleoside
  modified_base (16)..(16): 2' fluoro-modified nucleoside
  modified_base (17)..(17): 2' O-methyl modified nucleoside
  modified_base (18)..(18): 2' O-methyl modified nucleoside
  modified_base (19)..(19): 2' O-methyl modified nucleoside
  misc_feature (19)..(20): Phosphorothioate linkage
  modified_base (20)..(20): 2' O-methyl modified nucleoside
  misc_feature (20)..(21): Phosphorothioate linkage
  modified_base (21)..(21): 2' O-methyl modified nucleoside
auagcuguugaguucauuguu

SEQ ID NO: 11441 - RNA, 21 nt, Artificial Sequence
  Description of Artificial Sequence: Synthetic oligonucleotide
  modified_base (1)..(1): 2' O-methyl modified nucleoside
  misc_feature (1)..(2): Phosphorothioate linkage
  modified_base (2)..(2): 2' fluoro-modified nucleoside
  misc_feature (2)..(3): Phosphorothioate linkage
  modified_base (3)..(3): 2' O-methyl modified nucleoside
  modified_base (4)..(4): 2' O-methyl modified nucleoside
  modified_base (5)..(5): 2' O-methyl modified nucleoside
  modified_base (6)..(6): 2' fluoro-modified nucleoside
  modified_base (7)..(7): 2' O-methyl modified nucleoside
  modified_base (8)..(8): 2' O-methyl modified nucleoside
  modified_base (9)..(9): 2' O-methyl modified nucleoside
  modified_base (10)..(10): 2' O-methyl modified nucleoside
  modified_base (11)..(11): 2' O-methyl modified nucleoside
  modified_base (12)..(12): 2' O-methyl modified nucleoside
  modified_base (13)..(13): 2' O-methyl modified nucleoside
  modified_base (14)..(14): 2' fluoro-modified nucleoside
  modified_base (15)..(15): 2' O-methyl modified nucleoside
  modified_base (16)..(16): 2' fluoro-modified nucleoside
  modified_base (17)..(17): 2' O-methyl modified nucleoside
  modified_base (18)..(18): 2' O-methyl modified nucleoside
  modified_base (19)..(19): 2' O-methyl modified nucleoside
  misc_feature (19)..(20): Phosphorothioate linkage
  modified_base (20)..(20): 2' O-methyl modified nucleoside
  misc_feature (20)..(21): Phosphorothioate linkage
  modified_base (21)..(21): 2' O-methyl modified nucleoside
uagacucaagauaauuucauu

SEQ ID NO: 11442 - RNA, 21 nt, Artificial Sequence
  Description of Artificial Sequence: Synthetic oligonucleotide
  modified_base (1)..(1): 2' fluoro-modified nucleoside
  misc_feature (1)..(2): Phosphorothioate linkage
  modified_base (2)..(2): 2' O-methyl modified nucleoside
  misc_feature (2)..(3): Phosphorothioate linkage
  modified_base (3)..(3): 2' fluoro-modified nucleoside
  modified_base (4)..(4): 2' O-methyl modified nucleoside
  modified_base (5)..(5): 2' fluoro-modified nucleoside
  modified_base (6)..(6): 2' O-methyl modified nucleoside
  modified_base (7)..(7): 2' fluoro-modified nucleoside
  modified_base (8)..(8): 2' fluoro-modified nucleoside
  modified_base (9)..(9): 2' fluoro-modified nucleoside
  modified_base (10)..(10): 2' O-methyl modified nucleoside
  modified_base (11)..(11): 2' fluoro-modified nucleoside
  modified_base (12)..(12): 2' O-methyl modified nucleoside
  modified_base (13)..(13): 2' fluoro-modified nucleoside
  modified_base (14)..(14): 2' O-methyl modified nucleoside
  modified_base (15)..(15): 2' fluoro-modified nucleoside
  modified_base (16)..(16): 2' O-methyl modified nucleoside
  modified_base (17)..(17): 2' fluoro-modified nucleoside
  modified_base (18)..(18): 2' O-methyl modified nucleoside
  modified_base (19)..(19): 2' fluoro-modified nucleoside
  misc_feature (19)..(20): Phosphorothioate linkage
  modified_base (20)..(20): 2' O-methyl modified nucleoside
  misc_feature (20)..(21): Phosphorothioate linkage
  modified_base (21)..(21): 2' O-methyl modified nucleoside
agcaguagcuugucuuuuauu

SEQ ID NO: 11443 - RNA, 21 nt, Artificial Sequence
  Description of Artificial Sequence: Synthetic oligonucleotide
  modified_base (1)..(1): 2' fluoro-modified nucleoside
  misc_feature (1)..(2): Phosphorothioate linkage
  modified_base (2)..(2): 2' O-methyl modified nucleoside
  misc_feature (2)..(3): Phosphorothioate linkage
  modified_base (3)..(3): 2' fluoro-modified nucleoside
  modified_base (4)..(4): 2' O-methyl modified nucleoside
  modified_base (5)..(5): 2' fluoro-modified nucleoside
  modified_base (6)..(6): 2' O-methyl modified nucleoside
  modified_base (7)..(7): 2' fluoro-modified nucleoside
  modified_base (8)..(8): 2' fluoro-modified nucleoside
  modified_base (9)..(9): 2' fluoro-modified nucleoside
  modified_base (10)..(10): 2' O-methyl modified nucleoside
  modified_base (11)..(11): 2' fluoro-modified nucleoside
  modified_base (12)..(12): 2' O-methyl modified nucleoside
  modified_base (13)..(13): 2' fluoro-modified nucleoside
  modified_base (14)..(14): 2' O-methyl modified nucleoside
  modified_base (15)..(15): 2' fluoro-modified nucleoside
  modified_base (16)..(16): 2' O-methyl modified nucleoside
  modified_base (17)..(17): 2' fluoro-modified nucleoside
  modified_base (18)..(18): 2' O-methyl modified nucleoside
  modified_base (19)..(19): 2' fluoro-modified nucleoside
  misc_feature (19)..(20): Phosphorothioate linkage
  modified_base (20)..(20): 2' O-methyl modified nucleoside
  misc_feature (20)..(21): Phosphorothioate linkage
  modified_base (21)..(21): 2' O-methyl modified nucleoside
acacaaaaauuguucggcauu

SEQ ID NO: 11444 - RNA, 21 nt, Artificial Sequence
  Description of Artificial Sequence: Synthetic oligonucleotide
  modified_base (1)..(1): 2' fluoro-modified nucleoside
  misc_feature (1)..(2): Phosphorothioate linkage
  modified_base (2)..(2): 2' O-methyl modified nucleoside
  misc_feature (2)..(3): Phosphorothioate linkage
  modified_base (3)..(3): 2' fluoro-modified nucleoside
  modified_base (4)..(4): 2' O-methyl modified nucleoside
  modified_base (5)..(5): 2' fluoro-modified nucleoside
  modified_base (6)..(6): 2' O-methyl modified nucleoside
  modified_base (7)..(7): 2' fluoro-modified nucleoside
  modified_base (8)..(8): 2' fluoro-modified nucleoside
  modified_base (9)..(9): 2' fluoro-modified nucleoside
  modified_base (10)..(10): 2' O-methyl modified nucleoside
  modified_base (11)..(11): 2' fluoro-modified nucleoside
  modified_base (12)..(12): 2' O-methyl modified nucleoside
  modified_base (13)..(13): 2' fluoro-modified nucleoside
  modified_base (14)..(14): 2' O-methyl modified nucleoside
  modified_base (15)..(15): 2' fluoro-modified nucleoside
  modified_base (16)..(16): 2' O-methyl modified nucleoside
  modified_base (17)..(17): 2' fluoro-modified nucleoside
  modified_base (18)..(18): 2' O-methyl modified nucleoside
  modified_base (19)..(19): 2' fluoro-modified nucleoside
  misc_feature (19)..(20): Phosphorothioate linkage
  modified_base (20)..(20): 2' O-methyl modified nucleoside
  misc_feature (20)..(21): Phosphorothioate linkage
  modified_base (21)..(21): 2' O-methyl modified nucleoside
cacaaaaauuguucggcuauu

SEQ ID NO: 11445 - RNA, 21 nt, Artificial Sequence
  Description of Artificial Sequence: Synthetic oligonucleotide
  modified_base (1)..(1): 2' fluoro-modified nucleoside
  misc_feature (1)..(2): Phosphorothioate linkage
  modified_base (2)..(2): 2' O-methyl modified nucleoside
  misc_feature (2)..(3): Phosphorothioate linkage
  modified_base (3)..(3): 2' fluoro-modified nucleoside
  modified_base (4)..(4): 2' O-methyl modified nucleoside
  modified_base (5)..(5): 2' fluoro-modified nucleoside
  modified_base (6)..(6): 2' O-methyl modified nucleoside
  modified_base (7)..(7): 2' fluoro-modified nucleoside
  modified_base (8)..(8): 2' fluoro-modified nucleoside
  modified_base (9)..(9): 2' fluoro-modified nucleoside
  modified_base (10)..(10): 2' O-methyl modified nucleoside
  modified_base (11)..(11): 2' fluoro-modified nucleoside
  modified_base (12)..(12): 2' O-methyl modified nucleoside
  modified_base (13)..(13): 2' fluoro-modified nucleoside
  modified_base (14)..(14): 2' O-methyl modified nucleoside
  modified_base (15)..(15): 2' fluoro-modified nucleoside
  modified_base (16)..(16): 2' O-methyl modified nucleoside
  modified_base (17)..(17): 2' fluoro-modified nucleoside
  modified_base (18)..(18): 2' O-methyl modified nucleoside
  modified_base (19)..(19): 2' fluoro-modified nucleoside
  misc_feature (19)..(20): Phosphorothioate linkage
  modified_base (20)..(20): 2' O-methyl modified nucleoside
  misc_feature (20)..(21): Phosphorothioate linkage
  modified_base (21)..(21): 2' O-methyl modified nucleoside
gaagguagaugguguuauauu

SEQ ID NO: 11446 - RNA, 21 nt, Artificial Sequence
  Description of Artificial Sequence: Synthetic oligonucleotide
  modified_base (1)..(1): 2' O-methyl modified nucleoside
  misc_feature (1)..(2): Phosphorothioate linkage
  modified_base (2)..(2): 2' fluoro-modified nucleoside
  misc_feature (2)..(3): Phosphorothioate linkage
  modified_base (3)..(3): 2' O-methyl modified nucleoside
  modified_base (4)..(4): 2' fluoro-modified nucleoside
  modified_base (5)..(5): 2' O-methyl modified nucleoside
  modified_base (6)..(6): 2' fluoro-modified nucleoside
  modified_base (7)..(7): 2' O-methyl modified nucleoside
  modified_base (8)..(8): 2' fluoro-modified nucleoside
  modified_base (9)..(9): 2' O-methyl modified nucleoside
  modified_base (10)..(10): 2' fluoro-modified nucleoside
  modified_base (11)..(11): 2' O-methyl modified nucleoside
  modified_base (12)..(12): 2' O-methyl modified nucleoside
  modified_base (13)..(13): 2' O-methyl modified nucleoside
  modified_base (14)..(14): 2' fluoro-modified nucleoside
  modified_base (15)..(15): 2' O-methyl modified nucleoside
  modified_base (16)..(16): 2' fluoro-modified nucleoside
  modified_base (17)..(17): 2' O-methyl modified nucleoside
  modified_base (18)..(18): 2' fluoro-modified nucleoside
  modified_base (19)..(19): 2' O-methyl modified nucleoside
  misc_feature (19)..(20): Phosphorothioate linkage
  modified_base (20)..(20): 2' O-methyl modified nucleoside
  misc_feature (20)..(21): Phosphorothioate linkage
  modified_base (21)..(21): 2' O-methyl modified nucleoside
uaaaagacaagcuacugcuuu

SEQ ID NO: 11447 - RNA, 21 nt, Artificial Sequence
  Description of Artificial Sequence: Synthetic oligonucleotide
  modified_base (1)..(1): 2' O-methyl modified nucleoside
  misc_feature (1)..(2): Phosphorothioate linkage
  modified_base (2)..(2): 2' fluoro-modified nucleoside
  misc_feature (2)..(3): Phosphorothioate linkage
  modified_base (3)..(3): 2' O-methyl modified nucleoside
  modified_base (4)..(4): 2' fluoro-modified nucleoside
  modified_base (5)..(5): 2' O-methyl modified nucleoside
  modified_base (6)..(6): 2' fluoro-modified nucleoside
  modified_base (7)..(7): 2' O-methyl modified nucleoside
  modified_base (8)..(8): 2' fluoro-modified nucleoside
  modified_base (9)..(9): 2' O-methyl modified nucleoside
  modified_base (10)..(10): 2' fluoro-modified nucleoside
  modified_base (11)..(11): 2' O-methyl modified nucleoside
  modified_base (12)..(12): 2' O-methyl modified nucleoside
  modified_base (13)..(13): 2' O-methyl modified nucleoside
  modified_base (14)..(14): 2' fluoro-modified nucleoside
  modified_base (15)..(15): 2' O-methyl modified nucleoside
  modified_base (16)..(16): 2' fluoro-modified nucleoside
  modified_base (17)..(17): 2' O-methyl modified nucleoside
  modified_base (18)..(18): 2' fluoro-modified nucleoside
  modified_base (19)..(19): 2' O-methyl modified nucleoside
  misc_feature (19)..(20): Phosphorothioate linkage
  modified_base (20)..(20): 2' O-methyl modified nucleoside
  misc_feature (20)..(21): Phosphorothioate linkage
  modified_base (21)..(21): 2' O-methyl modified nucleoside
ugccgaacaauuuuuguguuu

SEQ ID NO: 11448 - RNA, 21 nt, Artificial Sequence
  Description of Artificial Sequence: Synthetic oligonucleotide
  modified_base (1)..(1): 2' O-methyl modified nucleoside
  misc_feature (1)..(2): Phosphorothioate linkage
  modified_base (2)..(2): 2' fluoro-modified nucleoside
  misc_feature (2)..(3): Phosphorothioate linkage
  modified_base (3)..(3): 2' O-methyl modified nucleoside
  modified_base (4)..(4): 2' fluoro-modified nucleoside
  modified_base (5)..(5): 2' O-methyl modified nucleoside
  modified_base (6)..(6): 2' fluoro-modified nucleoside
  modified_base (7)..(7): 2' O-methyl modified nucleoside
  modified_base (8)..(8): 2' fluoro-modified nucleoside
  modified_base (9)..(9): 2' O-methyl modified nucleoside
  modified_base (10)..(10): 2' fluoro-modified nucleoside
  modified_base (11)..(11): 2' O-methyl modified nucleoside
  modified_base (12)..(12): 2' O-methyl modified nucleoside
  modified_base (13)..(13): 2' O-methyl modified nucleoside
  modified_base (14)..(14): 2' fluoro-modified nucleoside
  modified_base (15)..(15): 2' O-methyl modified nucleoside
  modified_base (16)..(16): 2' fluoro-modified nucleoside
  modified_base (17)..(17): 2' O-methyl modified nucleoside
  modified_base (18)..(18): 2' fluoro-modified nucleoside
  modified_base (19)..(19): 2' O-methyl modified nucleoside
  misc_feature (19)..(20): Phosphorothioate linkage
  modified_base (20)..(20): 2' O-methyl modified nucleoside
  misc_feature (20)..(21): Phosphorothioate linkage
  modified_base (21)..(21): 2' O-methyl modified nucleoside
uagccgaacaauuuuuguguu

SEQ ID NO: 11449 - RNA, 21 nt, Artificial Sequence
  Description of Artificial Sequence: Synthetic oligonucleotide
  modified_base (1)..(1): 2' O-methyl modified nucleoside
  misc_feature (1)..(2): Phosphorothioate linkage
  modified_base (2)..(2): 2' fluoro-modified nucleoside
  misc_feature (2)..(3): Phosphorothioate linkage
  modified_base (3)..(3): 2' O-methyl modified nucleoside
  modified_base (4)..(4): 2' fluoro-modified nucleoside
  modified_base (5)..(5): 2' O-methyl modified nucleoside
  modified_base (6)..(6): 2' fluoro-modified nucleoside
  modified_base (7)..(7): 2' O-methyl modified nucleoside
  modified_base (8)..(8): 2' fluoro-modified nucleoside
  modified_base (9)..(9): 2' O-methyl modified nucleoside
  modified_base (10)..(10): 2' fluoro-modified nucleoside
  modified_base (11)..(11): 2' O-methyl modified nucleoside
  modified_base (12)..(12): 2' O-methyl modified nucleoside
  modified_base (13)..(13): 2' O-methyl modified nucleoside
  modified_base (14)..(14): 2' fluoro-modified nucleoside
  modified_base (15)..(15): 2' O-methyl modified nucleoside
  modified_base (16)..(16): 2' fluoro-modified nucleoside
  modified_base (17)..(17): 2' O-methyl modified nucleoside
  modified_base (18)..(18): 2' fluoro-modified nucleoside
  modified_base (19)..(19): 2' O-methyl modified nucleoside
  misc_feature (19)..(20): Phosphorothioate linkage
  modified_base (20)..(20): 2' O-methyl modified nucleoside
  misc_feature (20)..(21): Phosphorothioate linkage
  modified_base (21)..(21): 2' O-methyl modified nucleoside
uauaacaccaucuaccuucuu

SEQ ID NO: 11450 - RNA, 21 nt, Artificial Sequence
  Description of Artificial Sequence: Synthetic oligonucleotide
aaaacaacaaaguggcgaguu

SEQ ID NO: 11451 - RNA, 21 nt, Artificial Sequence
  Description of Artificial Sequence: Synthetic oligonucleotide
cucacccaaacccacaaaauu

SEQ ID NO: 11452 - RNA, 21 nt, Artificial Sequence
  Description of Artificial Sequence: Synthetic oligonucleotide
guauaagcuuccuccugauuu

SEQ ID NO: 11453 - RNA, 21 nt, Artificial Sequence
  Description of Artificial Sequence: Synthetic oligonucleotide
cugaguauagccacuuuguuu

SEQ ID NO: 11454 - RNA, 21 nt, Artificial Sequence
  Description of Artificial Sequence: Synthetic oligonucleotide
uugggcaaugaacucaacauu

SEQ ID NO: 11455 - RNA, 21 nt, Artificial Sequence
  Description of Artificial Sequence: Synthetic oligonucleotide
cauaacaacacagccuucauu

SEQ ID NO: 11456 - RNA, 21 nt, Artificial Sequence
  Description of Artificial Sequence: Synthetic oligonucleotide
uauguaccaaggauguuacuu

SEQ ID NO: 11457 - RNA, 21 nt, Artificial Sequence
  Description of Artificial Sequence: Synthetic oligonucleotide
uaccaaggauguuacaguauu

SEQ ID NO: 11458 - RNA, 21 nt, Artificial Sequence
  Description of Artificial Sequence: Synthetic oligonucleotide
gauguuacaguaaacaggauu

SEQ ID NO: 11459 - RNA, 21 nt, Artificial Sequence
  Description of Artificial Sequence: Synthetic oligonucleotide
uguuacaguaaacaggauguu

SEQ ID NO: 11460 - RNA, 21 nt, Artificial Sequence
  Description of Artificial Sequence: Synthetic oligonucleotide
ugcuaaaaagaaccauauuuu

SEQ ID NO: 11461 - RNA, 21 nt, Artificial Sequence
  Description of Artificial Sequence: Synthetic oligonucleotide
ggccuuugaguguuagagauu

SEQ ID NO: 11462 - RNA, 21 nt, Artificial Sequence
  Description of Artificial Sequence: Synthetic oligonucleotide
ggcacaaaacugccuuaaauu

SEQ ID NO: 11463 - RNA, 21 nt, Artificial Sequence
  Description of Artificial Sequence: Synthetic oligonucleotide
guaagaaacaagcucaagguu

SEQ ID NO: 11464 - RNA, 21 nt, Artificial Sequence
  Description of Artificial Sequence: Synthetic oligonucleotide
aaaacugaagguagaugguuu

SEQ ID NO: 11465 - RNA, 21 nt, Artificial Sequence
  Description of Artificial Sequence: Synthetic oligonucleotide
aacugaagguagaugguguuu

SEQ ID NO: 11466 - RNA, 21 nt, Artificial Sequence
  Description of Artificial Sequence: Synthetic oligonucleotide
augguguuauaguuaauaauu

SEQ ID NO: 11467 - RNA, 21 nt, Artificial Sequence
  Description of Artificial Sequence: Synthetic oligonucleotide
uuuccuucuacaauaaacauu

SEQ ID NO: 11468 - RNA, 21 nt, Artificial Sequence
  Description of Artificial Sequence: Synthetic oligonucleotide
caaugaacucaacagcuauuu

SEQ ID NO: 11469 - RNA, 21 nt, Artificial Sequence
  Description of Artificial Sequence: Synthetic oligonucleotide
ugaaauuaucuugagucuauu

SEQ ID NO: 11470 - RNA, 21 nt, Artificial Sequence
  Description of Artificial Sequence: Synthetic oligonucleotide
agcaguagcuugucuuuuauu

SEQ ID NO: 11471 - RNA, 21 nt, Artificial Sequence
  Description of Artificial Sequence: Synthetic oligonucleotide
acacaaaaauuguucggcauu

SEQ ID NO: 11472 - RNA, 21 nt, Artificial Sequence
  Description of Artificial Sequence: Synthetic oligonucleotide
cacaaaaauuguucggcuauu

SEQ ID NO: 11473 - RNA, 21 nt, Artificial Sequence
  Description of Artificial Sequence: Synthetic oligonucleotide
gaagguagaugguguuauauu

SEQ ID NO: 11474 - RNA, 21 nt, Artificial Sequence
  Description of Artificial Sequence: Synthetic oligonucleotide
auauguaccaaggauguuauu

SEQ ID NO: 11475 - RNA, 20 nt, Artificial Sequence
  Description of Artificial Sequence: Synthetic oligonucleotide
cucgccacuuuguuguuuuu

SEQ ID NO: 11476 - RNA, 21 nt, Artificial Sequence
  Description of Artificial Sequence: Synthetic oligonucleotide
uuuuguggguuugggugaguu

SEQ ID NO: 11477 - RNA, 21 nt, Artificial Sequence
  Description of Artificial Sequence: Synthetic oligonucleotide
aucaggaggaagcuuauacuu

SEQ ID NO: 11478 - RNA, 21 nt, Artificial Sequence
  Description of Artificial Sequence: Synthetic oligonucleotide
acaaaguggcuauacucaguu

SEQ ID NO: 11479 - RNA, 21 nt, Artificial Sequence
  Description of Artificial Sequence: Synthetic oligonucleotide
uguugaguucauugcccaauu

SEQ ID NO: 11480 - RNA, 21 nt, Artificial Sequence
  Description of Artificial Sequence: Synthetic oligonucleotide
ugaaggcuguguuguuauguu

SEQ ID NO: 11481 - RNA, 21 nt, Artificial Sequence
  Description of Artificial Sequence: Synthetic oligonucleotide
guaacauccuugguacauauu

SEQ ID NO: 11482 - RNA, 21 nt, Artificial Sequence
  Description of Artificial Sequence: Synthetic oligonucleotide
uacuguaacauccuugguauu

SEQ ID NO: 11483 - RNA, 21 nt, Artificial Sequence
  Description of Artificial Sequence: Synthetic oligonucleotide
uccuguuuacuguaacaucuu

SEQ ID NO: 11484 - RNA, 21 nt, Artificial Sequence
  Description of Artificial Sequence: Synthetic oligonucleotide
cauccuguuuacuguaacauu

SEQ ID NO: 11485 - RNA, 21 nt, Artificial Sequence
  Description of Artificial Sequence: Synthetic oligonucleotide
aauaugguucuuuuuagcauu

SEQ ID NO: 11486 - RNA, 21 nt, Artificial Sequence
  Description of Artificial Sequence: Synthetic oligonucleotide
ucucuaacacucaaaggccuu

SEQ ID NO: 11487 - RNA, 21 nt, Artificial Sequence
  Description of Artificial Sequence: Synthetic oligonucleotide
uuuaaggcaguuuugugccuu

SEQ ID NO: 11488 - RNA, 21 nt, Artificial Sequence
  Description of Artificial Sequence: Synthetic oligonucleotide
ccuugagcuuguuucuuacuu

SEQ ID NO: 11489 - RNA, 21 nt, Artificial Sequence
  Description of Artificial Sequence: Synthetic oligonucleotide
accaucuaccuucaguuuuuu

SEQ ID NO: 11490 - RNA, 21 nt, Artificial Sequence
  Description of Artificial Sequence: Synthetic oligonucleotide
acaccaucuaccuucaguuuu

SEQ ID NO: 11491 - RNA, 21 nt, Artificial Sequence
  Description of Artificial Sequence: Synthetic oligonucleotide
uuauuaacuauaacaccauuu

SEQ ID NO: 11492 - RNA, 21 nt, Artificial Sequence
  Description of Artificial Sequence: Synthetic oligonucleotide
uguuuauuguagaaggaaauu

SEQ ID NO: 11493 - RNA, 21 nt, Artificial Sequence
  Description of Artificial Sequence: Synthetic oligonucleotide
auagcuguugaguucauuguu

SEQ ID NO: 11494 - RNA, 21 nt, Artificial Sequence
  Description of Artificial Sequence: Synthetic oligonucleotide
uagacucaagauaauuucauu

SEQ ID NO: 11495 - RNA, 21 nt, Artificial Sequence
  Description of Artificial Sequence: Synthetic oligonucleotide
uaaaagacaagcuacugcuuu

SEQ ID NO: 11496 - RNA, 21 nt, Artificial Sequence
  Description of Artificial Sequence: Synthetic oligonucleotide
ugccgaacaauuuuuguguuu

SEQ ID NO: 11497 - RNA, 21 nt, Artificial Sequence
  Description of Artificial Sequence: Synthetic oligonucleotide
uagccgaacaauuuuuguguu

SEQ ID NO: 11498 - RNA, 21 nt, Artificial Sequence
  Description of Artificial Sequence: Synthetic oligonucleotide
uauaacaccaucuaccuucuu

SEQ ID NO: 11499 - RNA, 21 nt, Artificial Sequence
  Description of Artificial Sequence: Synthetic oligonucleotide
uaacauccuugguacauauuu

SEQ ID NO: 11500 - RNA, 21 nt, Artificial Sequence
  Description of Artificial Sequence: Synthetic oligonucleotide
  modified_base (1)..(1): 2' fluoro-modified nucleoside
  misc_feature (1)..(2): Phosphorothioate linkage
  modified_base (2)..(2): 2' O-methyl modified nucleoside
  misc_feature (2)..(3): Phosphorothioate linkage
  modified_base (3)..(3): 2' fluoro-modified nucleoside
  modified_base (4)..(4): 2' O-methyl modified nucleoside
  modified_base (5)..(5): 2' fluoro-modified nucleoside
  modified_base (6)..(6): 2' O-methyl modified nucleoside
  modified_base (7)..(7): 2' fluoro-modified nucleoside
  modified_base (8)..(8): 2' O-methyl modified nucleoside
  modified_base (9)..(9): 2' fluoro-modified nucleoside
  modified_base (10)..(10): 2' O-methyl modified nucleoside
  modified_base (11)..(11): 2' fluoro-modified nucleoside
  modified_base (12)..(12): 2' O-methyl modified nucleoside
  modified_base (13)..(13): 2' fluoro-modified nucleoside
  modified_base (14)..(14): 2' O-methyl modified nucleoside
  modified_base (15)..(15): 2' fluoro-modified nucleoside
  modified_base (16)..(16): 2' O-methyl modified nucleoside
  modified_base (17)..(17): 2' fluoro-modified nucleoside
  modified_base (18)..(18): 2' O-methyl modified nucleoside
  modified_base (19)..(19): 2' fluoro-modified nucleoside
  misc_feature (19)..(20): Phosphorothioate linkage
  modified_base (20)..(20): 2' O-methyl modified nucleoside
  misc_feature (20)..(21): Phosphorothioate linkage
  modified_base (21)..(21): 2' O-methyl modified nucleoside
auauguaccaaggauguuauu

SEQ ID NO: 11501 - RNA, 21 nt, Artificial Sequence
  Description of Artificial Sequence: Synthetic oligonucleotide
  modified_base (1)..(1): 2' fluoro-modified nucleoside
  misc_feature (1)..(2): Phosphorothioate linkage
  modified_base (2)..(2): 2' O-methyl modified nucleoside
  misc_feature (2)..(3): Phosphorothioate linkage
  modified_base (3)..(3): 2' fluoro-modified nucleoside
  modified_base (4)..(4): 2' O-methyl modified nucleoside
  modified_base (5)..(5): 2' fluoro-modified nucleoside
  modified_base (6)..(6): 2' O-methyl modified nucleoside
  modified_base (7)..(7): 2' fluoro-modified nucleoside
  modified_base (8)..(8): 2' O-methyl modified nucleoside
  modified_base (9)..(9): 2' fluoro-modified nucleoside
  modified_base (10)..(10): 2' O-methyl modified nucleoside
  modified_base (11)..(11): 2' fluoro-modified nucleoside
  modified_base (12)..(12): 2' O-methyl modified nucleoside
  modified_base (13)..(13): 2' fluoro-modified nucleoside
  modified_base (14)..(14): 2' O-methyl modified nucleoside
  modified_base (15)..(15): 2' fluoro-modified nucleoside
  modified_base (16)..(16): 2' O-methyl modified nucleoside
  modified_base (17)..(17): 2' fluoro-modified nucleoside
  modified_base (18)..(18): 2' O-methyl modified nucleoside
  modified_base (19)..(19): 2' fluoro-modified nucleoside
  misc_feature (19)..(20): Phosphorothioate linkage
  modified_base (20)..(20): 2' O-methyl modified nucleoside
  misc_feature (20)..(21): Phosphorothioate linkage
  modified_base (21)..(21): 2' O-methyl modified nucleoside
auauguaccaaggauguuauu

SEQ ID NO: 11502 - RNA, 21 nt, Artificial Sequence
  Description of Artificial Sequence: Synthetic oligonucleotide
  modified_base (1)..(1): 2' fluoro-modified nucleoside
  misc_feature (1)..(2): Phosphorothioate linkage
  modified_base (2)..(2): 2' O-methyl modified nucleoside
  misc_feature (2)..(3): Phosphorothioate linkage
  modified_base (3)..(3): 2' fluoro-modified nucleoside
  modified_base (4)..(4): 2' O-methyl modified nucleoside
  modified_base (5)..(5): 2' fluoro-modified nucleoside
  modified_base (6)..(6): 2' O-methyl modified nucleoside
  modified_base (7)..(7): 2' fluoro-modified nucleoside
  modified_base (8)..(8): 2' O-methyl modified nucleoside
  modified_base (9)..(9): 2' fluoro-modified nucleoside
  modified_base (10)..(10): 2' O-methyl modified nucleoside
  modified_base (11)..(11): 2' fluoro-modified nucleoside
  modified_base (12)..(12): 2' O-methyl modified nucleoside
  modified_base (13)..(13): 2' fluoro-modified nucleoside
  modified_base (14)..(14): 2' O-methyl modified nucleoside
  modified_base (15)..(15): 2' fluoro-modified nucleoside
  modified_base (16)..(16): 2' O-methyl modified nucleoside
  modified_base (17)..(17): 2' fluoro-modified nucleoside
  modified_base (18)..(18): 2' O-methyl modified nucleoside
  modified_base (19)..(19): 2' fluoro-modified nucleoside
  misc_feature (19)..(20): Phosphorothioate linkage
  modified_base (20)..(20): 2' O-methyl modified nucleoside
  misc_feature (20)..(21): Phosphorothioate linkage
  modified_base (21)..(21): 2' O-methyl modified nucleoside
agcaguagcuugucuuuuauu

SEQ ID NO: 11503 - RNA, 21 nt, Artificial Sequence
  Description of Artificial Sequence: Synthetic oligonucleotide
  modified_base (1)..(1): 2' fluoro-modified nucleoside
  misc_feature (1)..(2): Phosphorothioate linkage
  modified_base (2)..(2): 2' O-methyl modified nucleoside
  misc_feature (2)..(3): Phosphorothioate linkage
  modified_base (3)..(3): 2' fluoro-modified nucleoside
  modified_base (4)..(4): 2' O-methyl modified nucleoside
  modified_base (5)..(5): 2' fluoro-modified nucleoside
  modified_base (6)..(6): 2' O-methyl modified nucleoside
  modified_base (7)..(7): 2' fluoro-modified nucleoside
  modified_base (8)..(8): 2' O-methyl modified nucleoside
  modified_base (9)..(9): 2' fluoro-modified nucleoside
  modified_base (10)..(10): 2' O-methyl modified nucleoside
  modified_base (11)..(11): 2' fluoro-modified nucleoside
  modified_base (12)..(12): 2' O-methyl modified nucleoside
  modified_base (13)..(13): 2' fluoro-modified nucleoside
  modified_base (14)..(14): 2' O-methyl modified nucleoside
  modified_base (15)..(15): 2' fluoro-modified nucleoside
  modified_base (16)..(16): 2' O-methyl modified nucleoside
  modified_base (17)..(17): 2' fluoro-modified nucleoside
  modified_base (18)..(18): 2' O-methyl modified nucleoside
  modified_base (19)..(19): 2' fluoro-modified nucleoside
  misc_feature (19)..(20): Phosphorothioate linkage
  modified_base (20)..(20): 2' O-methyl modified nucleoside
  misc_feature (20)..(21): Phosphorothioate linkage
  modified_base (21)..(21): 2' O-methyl modified nucleoside
gaagguagaugguguuauauu

SEQ ID NO: 11504 - RNA, 21 nt, Artificial Sequence
  Description of Artificial Sequence: Synthetic oligonucleotide
  modified_base (1)..(1): 2' O-methyl modified nucleoside
  misc_feature (1)..(2): Phosphorothioate linkage
  modified_base (2)..(2): 2' fluoro-modified nucleoside
  misc_feature (2)..(3): Phosphorothioate linkage
  modified_base (3)..(3): 2' O-methyl modified nucleoside
  modified_base (4)..(4): 2' fluoro-modified nucleoside
  modified_base (5)..(5): 2' O-methyl modified nucleoside
  modified_base (6)..(6): 2' fluoro-modified nucleoside
  modified_base (7)..(7): 2' O-methyl modified nucleoside
  modified_base (8)..(8): 2' fluoro-modified nucleoside
  modified_base (9)..(9): 2' O-methyl modified nucleoside
  modified_base (10)..(10): 2' fluoro-modified nucleoside
  modified_base (11)..(11): 2' O-methyl modified nucleoside
  modified_base (12)..(12): 2' fluoro-modified nucleoside
  modified_base (13)..(13): 2' O-methyl modified nucleoside
  modified_base (14)..(14): 2' fluoro-modified nucleoside
  modified_base (15)..(15): 2' O-methyl modified nucleoside
  modified_base (16)..(16): 2' fluoro-modified nucleoside
  modified_base (17)..(17): 2' O-methyl modified nucleoside
  modified_base (18)..(18): 2' fluoro-modified nucleoside
  modified_base (19)..(19): 2' O-methyl modified nucleoside
  misc_feature (19)..(20): Phosphorothioate linkage
  modified_base (20)..(20): 2' O-methyl modified nucleoside
  misc_feature (20)..(21): Phosphorothioate linkage
  modified_base (21)..(21): 2' O-methyl modified nucleoside
uaacauccuugguacauauuu

SEQ ID NO: 11505 - RNA, 21 nt, Artificial Sequence
  Description of Artificial Sequence: Synthetic oligonucleotide
  modified_base (1)..(1): 2' O-methyl modified nucleoside
  misc_feature (1)..(2): Phosphorothioate linkage
  modified_base (2)..(2): 2' fluoro-modified nucleoside
  misc_feature (2)..(3): Phosphorothioate linkage
  modified_base (3)..(3): 2' O-methyl modified nucleoside
  modified_base (4)..(4): 2' fluoro-modified nucleoside
  modified_base (5)..(5): 2' O-methyl modified nucleoside
  modified_base (6)..(6): 2' fluoro-modified nucleoside
  modified_base (7)..(7): 2' O-methyl modified nucleoside
  modified_base (8)..(8): 2' fluoro-modified nucleoside
  modified_base (9)..(9): 2' O-methyl modified nucleoside
  modified_base (10)..(10): 2' fluoro-modified nucleoside
  modified_base (11)..(11): 2' O-methyl modified nucleoside
  modified_base (12)..(12): 2' fluoro-modified nucleoside
  modified_base (13)..(13): 2' O-methyl modified nucleoside
  modified_base (14)..(14): 2' fluoro-modified nucleoside
  modified_base (15)..(15): 2' O-methyl modified nucleoside
  modified_base (16)..(16): 2' fluoro-modified nucleoside
  modified_base (17)..(17): 2' O-methyl modified nucleoside
  modified_base (18)..(18): 2' fluoro-modified nucleoside
  modified_base (19)..(19): 2' O-methyl modified nucleoside
  misc_feature (19)..(20): Phosphorothioate linkage
  modified_base (20)..(20): 2' O-methyl modified nucleoside
  misc_feature (20)..(21): Phosphorothioate linkage
  modified_base (21)..(21): 2' O-methyl modified nucleoside
uaacauccuugguacauauuu

SEQ ID NO: 11506 - RNA, 21 nt, Artificial Sequence
  Description of Artificial Sequence: Synthetic oligonucleotide
  modified_base (1)..(1): 2' O-methyl modified nucleoside
  misc_feature (1)..(2): Phosphorothioate linkage
  modified_base (2)..(2): 2' fluoro-modified nucleoside
  misc_feature (2)..(3): Phosphorothioate linkage
  modified_base (3)..(3): 2' O-methyl modified nucleoside
  modified_base (4)..(4): 2' fluoro-modified nucleoside
  modified_base (5)..(5): 2' O-methyl modified nucleoside
  modified_base (6)..(6): 2' fluoro-modified nucleoside
  modified_base (7)..(7): 2' O-methyl modified nucleoside
  modified_base (8)..(8): 2' fluoro-modified nucleoside
  modified_base (9)..(9): 2' O-methyl modified nucleoside
  modified_base (10)..(10): 2' fluoro-modified nucleoside
  modified_base (11)..(11): 2' O-methyl modified nucleoside
  modified_base (12)..(12): 2' fluoro-modified nucleoside
  modified_base (13)..(13): 2' O-methyl modified nucleoside
  modified_base (14)..(14): 2' fluoro-modified nucleoside
  modified_base (15)..(15): 2' O-methyl modified nucleoside
  modified_base (16)..(16): 2' fluoro-modified nucleoside
  modified_base (17)..(17): 2' O-methyl modified nucleoside
  modified_base (18)..(18): 2' fluoro-modified nucleoside
  modified_base (19)..(19): 2' O-methyl modified nucleoside
  misc_feature (19)..(20): Phosphorothioate linkage
  modified_base (20)..(20): 2' O-methyl modified nucleoside
  misc_feature (20)..(21): Phosphorothioate linkage
  modified_base (21)..(21): 2' O-methyl modified nucleoside
uaaaagacaagcuacugcuuu

SEQ ID NO: 11507 - RNA, 21 nt, Artificial Sequence
  Description of Artificial Sequence: Synthetic oligonucleotide
  modified_base (1)..(1): 2' O-methyl modified nucleoside
  misc_feature (1)..(2): Phosphorothioate linkage
  modified_base (2)..(2): 2' fluoro-modified nucleoside
  misc_feature (2)..(3): Phosphorothioate linkage
  modified_base (3)..(3): 2' O-methyl modified nucleoside
  modified_base (4)..(4): 2' fluoro-modified nucleoside
  modified_base (5)..(5): 2' O-methyl modified nucleoside
  modified_base (6)..(6): 2' fluoro-modified nucleoside
  modified_base (7)..(7): 2' O-methyl modified nucleoside
  modified_base (8)..(8): 2' fluoro-modified nucleoside
  modified_base (9)..(9): 2' O-methyl modified nucleoside
  modified_base (10)..(10): 2' fluoro-modified nucleoside
  modified_base (11)..(11): 2' O-methyl modified nucleoside
  modified_base (12)..(12): 2' fluoro-modified nucleoside
  modified_base (13)..(13): 2' O-methyl modified nucleoside
  modified_base (14)..(14): 2' fluoro-modified nucleoside
  modified_base (15)..(15): 2' O-methyl modified nucleoside
  modified_base (16)..(16): 2' fluoro-modified nucleoside
  modified_base (17)..(17): 2' O-methyl modified nucleoside
  modified_base (18)..(18): 2' fluoro-modified nucleoside
  modified_base (19)..(19): 2' O-methyl modified nucleoside
  misc_feature (19)..(20): Phosphorothioate linkage
  modified_base (20)..(20): 2' O-methyl modified nucleoside
  misc_feature (20)..(21): Phosphorothioate linkage
  modified_base (21)..(21): 2' O-methyl modified nucleoside
uauaacaccaucuaccuucuu

SEQ ID NO: 11508 - RNA, 22 nt, Artificial Sequence
  Description of Artificial Sequence: Synthetic oligonucleotide
  modified_base (1)..(1): Any 2' fluoro-modified nucleoside
  misc_feature (1)..(2): Phosphorothioate linkage
  modified_base (2)..(2): Any 2' O-methyl modified nucleoside
  misc_feature (2)..(3): Phosphorothioate linkage
  modified_base (3)..(3): Any 2' fluoro-modified nucleoside
  modified_base (4)..(4): Any 2' O-methyl modified nucleoside
  modified_base (5)..(5): Any 2' fluoro-modified nucleoside
  modified_base (6)..(6): Any 2' O-methyl modified nucleoside
  modified_base (7)..(7): Any 2' fluoro-modified nucleoside
  modified_base (8)..(8): Any 2' O-methyl modified nucleoside
  modified_base (9)..(9): Any 2' fluoro-modified nucleoside
  modified_base (10)..(10): Any 2' O-methyl modified nucleoside
  modified_base (11)..(11): Any 2' fluoro-modified nucleoside
  modified_base (12)..(12): Any 2' O-methyl modified nucleoside
  modified_base (13)..(13): Any 2' fluoro-modified nucleoside
  modified_base (14)..(14): Any 2' O-methyl modified nucleoside
  modified_base (15)..(15): Any 2' fluoro-modified nucleoside
  modified_base (16)..(16): Any 2' O-methyl modified nucleoside
  modified_base (17)..(17): Any 2' fluoro-modified nucleoside
  modified_base (18)..(18): Any 2' O-methyl modified nucleoside
  modified_base (19)..(19): Any 2' fluoro-modified nucleoside
  misc_feature (19)..(20): Phosphorothioate linkage
  modified_base (20)..(20): Any 2' O-methyl modified nucleoside
  misc_feature (20)..(21): Phosphorothioate linkage
  modified_base (21)..(21): Any 2' O-methyl modified nucleoside
  modified_base (22)..(22): Any nucleoside
nnnnnnnnnnnnnnnnnnnnnn

SEQ ID NO: 11509 - RNA, 22 nt, Artificial Sequence
  Description of Artificial Sequence: Synthetic oligonucleotide
  modified_base (1)..(1): Any 2' O-methyl modified nucleoside
  misc_feature (1)..(2): Phosphorothioate linkage
  modified_base (2)..(2): Any 2' O-methyl modified nucleoside
  misc_feature (2)..(3): Phosphorothioate linkage
  modified_base (3)..(3): Any 2' O-methyl modified nucleoside
  modified_base (4)..(4): Any 2' O-methyl modified nucleoside
  modified_base (5)..(5): Any 2' fluoro-modified nucleoside
  modified_base (6)..(6): Any 2' O-methyl modified nucleoside
  modified_base (7)..(7): Any 2' fluoro-modified nucleoside
  modified_base (8)..(8): Any 2' O-methyl modified nucleoside
  modified_base (9)..(9): Any 2' fluoro-modified nucleoside
  modified_base (10)..(10): Any 2' O-methyl modified nucleoside
  modified_base (11)..(11): Any 2' O-methyl modified nucleoside
  modified_base (12)..(12): Any 2' O-methyl modified nucleoside
  modified_base (13)..(13): Any 2' O-methyl modified nucleoside
  modified_base (14)..(14): Any 2' O-methyl modified nucleoside
  modified_base (15)..(15): Any 2' O-methyl modified nucleoside
  modified_base (16)..(16): Any 2' O-methyl modified nucleoside
  modified_base (17)..(17): Any 2' O-methyl modified nucleoside
  modified_base (18)..(18): Any 2' O-methyl modified nucleoside
  modified_base (19)..(19): Any 2' O-methyl modified nucleoside
  misc_feature (19)..(20): Phosphorothioate linkage
  modified_base (20)..(20): Any 2' O-methyl modified nucleoside
  misc_feature (20)..(21): Phosphorothioate linkage
  modified_base (21)..(21): Any 2' O-methyl modified nucleoside
  modified_base (22)..(22): Any nucleoside
nnnnnnnnnnnnnnnnnnnnnn

SEQ ID NO: 11510 - RNA, 22 nt, Artificial Sequence
  Description of Artificial Sequence: Synthetic oligonucleotide
  modified_base (1)..(1): Any 2' fluoro-modified nucleoside
  misc_feature (1)..(2): Phosphorothioate linkage
  modified_base (2)..(2): Any 2' O-methyl modified nucleoside
  misc_feature (2)..(3): Phosphorothioate linkage
  modified_base (3)..(3): Any 2' fluoro-modified nucleoside
  modified_base (4)..(4): Any 2' O-methyl modified nucleoside
  modified_base (5)..(5): Any 2' fluoro-modified nucleoside
  modified_base (6)..(6): Any 2' O-methyl modified nucleoside
  modified_base (7)..(7): Any 2' fluoro-modified nucleoside
  modified_base (8)..(8): Any 2' O-methyl modified nucleoside
  modified_base (9)..(9): Any 2' fluoro-modified nucleoside
  modified_base (10)..(10): Any 2' O-methyl modified nucleoside
  modified_base (11)..(11): Any 2' fluoro-modified nucleoside
  modified_base (12)..(12): Any 2' O-methyl modified nucleoside
  modified_base (13)..(13): Any 2' fluoro-modified nucleoside
  modified_base (14)..(14): Any 2' O-methyl modified nucleoside
  modified_base (15)..(15): Any 2' fluoro-modified nucleoside
  modified_base (16)..(16): Any 2' O-methyl modified nucleoside
  modified_base (17)..(17): Any 2' fluoro-modified nucleoside
  modified_base (18)..(18): Any 2' O-methyl modified nucleoside
  modified_base (19)..(19): Any 2' fluoro-modified nucleoside
  misc_feature (19)..(20): Phosphorothioate linkage
  modified_base (20)..(20): Any 2' O-methyl modified nucleoside
  misc_feature (20)..(21): Phosphorothioate linkage
  modified_base (21)..(21): Any 2' O-methyl modified nucleoside
  modified_base (22)..(22): Any nucleoside
nnnnnnnnnnnnnnnnnnnnnn

SEQ ID NO: 11511 - RNA, 22 nt, Artificial Sequence
  Description of Artificial Sequence: Synthetic oligonucleotide
  modified_base (1)..(1): Any 2' O-methyl modified nucleoside
  misc_feature (1)..(2): Phosphorothioate linkage
  modified_base (2)..(2): Any 2' O-methyl modified nucleoside
  misc_feature (2)..(3): Phosphorothioate linkage
  modified_base (3)..(3): Any 2' O-methyl modified nucleoside
  modified_base (4)..(4): Any 2' O-methyl modified nucleoside
  modified_base (5)..(5): Any 2' fluoro-modified nucleoside
  modified_base (6)..(6): Any 2' O-methyl modified nucleoside
  modified_base (7)..(7): Any 2' fluoro-modified nucleoside
  modified_base (8)..(8): Any 2' O-methyl modified nucleoside
  modified_base (9)..(9): Any 2' fluoro-modified nucleoside
  modified_base (10)..(10): Any 2' O-methyl modified nucleoside
  modified_base (11)..(11): Any 2' O-methyl modified nucleoside
  modified_base (12)..(12): Any 2' O-methyl modified nucleoside
  modified_base (13)..(13): Any 2' O-methyl modified nucleoside
  modified_base (14)..(14): Any 2' O-methyl modified nucleoside
  modified_base (15)..(15): Any 2' O-methyl modified nucleoside
  modified_base (16)..(16): Any 2' O-methyl modified nucleoside
  modified_base (17)..(17): Any 2' O-methyl modified nucleoside
  modified_base (18)..(18): Any 2' O-methyl modified nucleoside
  modified_base (19)..(19): Any 2' O-methyl modified nucleoside
  misc_feature (19)..(20): Phosphorothioate linkage
  modified_base (20)..(20): Any 2' O-methyl modified nucleoside
  misc_feature (20)..(21): Phosphorothioate linkage
  modified_base (21)..(21): Any 2' O-methyl modified nucleoside
  modified_base (22)..(22): Any nucleoside
nnnnnnnnnnnnnnnnnnnnnn

SEQ ID NO: 11512 - RNA, 21 nt, Artificial Sequence
  Description of Artificial Sequence: Synthetic oligonucleotide
caaccagauugacaucauguu

SEQ ID NO: 11513 - RNA, 21 nt, Artificial Sequence
  Description of Artificial Sequence: Synthetic oligonucleotide
caaacauccucagucaaaauu

SEQ ID NO: 11514 - RNA, 21 nt, Artificial Sequence
  Description of Artificial Sequence: Synthetic oligonucleotide
cacacaguaugaacuacuguu

SEQ ID NO: 11515 - RNA, 21 nt, Artificial Sequence
  Description of Artificial Sequence: Synthetic oligonucleotide
cuuacgcugaguacuucgauu

SEQ ID NO: 11516 - RNA, 21 nt, Artificial Sequence
  Description of Artificial Sequence: Synthetic oligonucleotide
caugaugucaaucugguuguu

SEQ ID NO: 11517 - RNA, 21 nt, Artificial Sequence
  Description of Artificial Sequence: Synthetic oligonucleotide
uuuugacugaggauguuuguu

SEQ ID NO: 11518 - RNA, 21 nt, Artificial Sequence
  Description of Artificial Sequence: Synthetic oligonucleotide
caguaguucauacuguguguu

SEQ ID NO: 11519 - RNA, 21 nt, Artificial Sequence
  Description of Artificial Sequence: Synthetic oligonucleotide
ucgaaguacucagcguaaguu

SEQ ID NO: 11520 - RNA, 21 nt, Artificial Sequence
  Description of Artificial Sequence: Synthetic oligonucleotide
  modified_base (1)..(1): 2' fluoro-modified nucleoside
  misc_feature (1)..(2): Phosphorothioate linkage
  modified_base (2)..(2): 2' O-methyl modified nucleoside
  misc_feature (2)..(3): Phosphorothioate linkage
  modified_base (3)..(3): 2' fluoro-modified nucleoside
  modified_base (4)..(4): 2' O-methyl modified nucleoside
  modified_base (5)..(5): 2' fluoro-modified nucleoside
  modified_base (6)..(6): 2' O-methyl modified nucleoside
  modified_base (7)..(7): 2' fluoro-modified nucleoside
  modified_base (8)..(8): 2' fluoro-modified nucleoside
  modified_base (9)..(9): 2' fluoro-modified nucleoside
  modified_base (10)..(10): 2' O-methyl modified nucleoside
  modified_base (11)..(11): 2' fluoro-modified nucleoside
  modified_base (12)..(12): 2' O-methyl modified nucleoside
  modified_base (13)..(13): 2' fluoro-modified nucleoside
  modified_base (14)..(14): 2' O-methyl modified nucleoside
  modified_base (15)..(15): 2' fluoro-modified nucleoside
  modified_base (16)..(16): 2' O-methyl modified nucleoside
  modified_base (17)..(17): 2' fluoro-modified nucleoside
  modified_base (18)..(18): 2' O-methyl modified nucleoside
  modified_base (19)..(19): 2' fluoro-modified nucleoside
  misc_feature (19)..(20): Phosphorothioate linkage
  modified_base (20)..(20): 2' O-methyl modified nucleoside
  misc_feature (20)..(21): Phosphorothioate linkage
  modified_base (21)..(21): 2' O-methyl modified nucleoside
caaccagauugacaucauguu

SEQ ID NO: 11521 - RNA, 21 nt, Artificial Sequence
  Description of Artificial Sequence: Synthetic oligonucleotide
  modified_base (1)..(1): 2' fluoro-modified nucleoside
  misc_feature (1)..(2): Phosphorothioate linkage
  modified_base (2)..(2): 2' O-methyl modified nucleoside
  misc_feature (2)..(3): Phosphorothioate linkage
  modified_base (3)..(3): 2' fluoro-modified nucleoside
  modified_base (4)..(4): 2' O-methyl modified nucleoside
  modified_base (5)..(5): 2' fluoro-modified nucleoside
  modified_base (6)..(6): 2' O-methyl modified nucleoside
  modified_base (7)..(7): 2' fluoro-modified nucleoside
  modified_base (8)..(8): 2' fluoro-modified nucleoside
  modified_base (9)..(9): 2' fluoro-modified nucleoside
  modified_base (10)..(10): 2' O-methyl modified nucleoside
  modified_base (11)..(11): 2' fluoro-modified nucleoside
  modified_base (12)..(12): 2' O-methyl modified nucleoside
  modified_base (13)..(13): 2' fluoro-modified nucleoside
  modified_base (14)..(14): 2' O-methyl modified nucleoside
  modified_base (15)..(15): 2' fluoro-modified nucleoside
  modified_base (16)..(16): 2' O-methyl modified nucleoside
  modified_base (17)..(17): 2' fluoro-modified nucleoside
  modified_base (18)..(18): 2' O-methyl modified nucleoside
  modified_base (19)..(19): 2' fluoro-modified nucleoside
  misc_feature (19)..(20): Phosphorothioate linkage
  modified_base (20)..(20): 2' O-methyl modified nucleoside
  misc_feature (20)..(21): Phosphorothioate linkage
  modified_base (21)..(21): 2' O-methyl modified nucleoside
caaacauccucagucaaaauu

SEQ ID NO: 11522 - RNA, 21 nt, Artificial Sequence
  Description of Artificial Sequence: Synthetic oligonucleotide
  modified_base (1)..(1): 2' O-methyl modified nucleoside
  misc_feature (1)..(2): Phosphorothioate linkage
  modified_base (2)..(2): 2' O-methyl modified nucleoside
  misc_feature (2)..(3): Phosphorothioate linkage
  modified_base (3)..(3): 2' O-methyl modified nucleoside
  modified_base (4)..(4): 2' O-methyl modified nucleoside
  modified_base (5)..(5): 2' fluoro-modified nucleoside
  modified_base (6)..(6): 2' O-methyl modified nucleoside
  modified_base (7)..(7): 2' fluoro-modified nucleoside
  modified_base (8)..(8): 2' fluoro-modified nucleoside
  modified_base (9)..(9): 2' fluoro-modified nucleoside
  modified_base (10)..(10): 2' O-methyl modified nucleoside
  modified_base (11)..(11): 2' O-methyl modified nucleoside
  modified_base (12)..(12): 2' O-methyl modified nucleoside
  modified_base (13)..(13): 2' O-methyl modified nucleoside
  modified_base (14)..(14): 2' O-methyl modified nucleoside
  modified_base (15)..(15): 2' O-methyl modified nucleoside
  modified_base (16)..(16): 2' O-methyl modified nucleoside
  modified_base (17)..(17): 2' O-methyl modified nucleoside
  modified_base (18)..(18): 2' O-methyl modified nucleoside
  modified_base (19)..(19): 2' O-methyl modified nucleoside
  misc_feature (19)..(20): Phosphorothioate linkage
  modified_base (20)..(20): 2' O-methyl modified nucleoside
  misc_feature (20)..(21): Phosphorothioate linkage
  modified_base (21)..(21): 2' O-methyl modified nucleoside
cacacaguaugaacuacuguu

SEQ ID NO: 11523 - RNA, 21 nt, Artificial Sequence
  Description of Artificial Sequence: Synthetic oligonucleotide
  modified_base (1)..(1): 2' O-methyl modified nucleoside
  misc_feature (1)..(2): Phosphorothioate linkage
  modified_base (2)..(2): 2' O-methyl modified nucleoside
  misc_feature (2)..(3): Phosphorothioate linkage
  modified_base (3)..(3): 2' O-methyl modified nucleoside
  modified_base (4)..(4): 2' O-methyl modified nucleoside
  modified_base (5)..(5): 2' fluoro-modified nucleoside
  modified_base (6)..(6): 2' O-methyl modified nucleoside
  modified_base (7)..(7): 2' fluoro-modified nucleoside
  modified_base (8)..(8): 2' fluoro-modified nucleoside
  modified_base (9)..(9): 2' fluoro-modified nucleoside
  modified_base (10)..(10): 2' O-methyl modified nucleoside
  modified_base (11)..(11): 2' O-methyl modified nucleoside
  modified_base (12)..(12): 2' O-methyl modified nucleoside
  modified_base (13)..(13): 2' O-methyl modified nucleoside
  modified_base (14)..(14): 2' O-methyl modified nucleoside
  modified_base (15)..(15): 2' O-methyl modified nucleoside
  modified_base (16)..(16): 2' O-methyl modified nucleoside
  modified_base (17)..(17): 2' O-methyl modified nucleoside
  modified_base (18)..(18): 2' O-methyl modified nucleoside
  modified_base (19)..(19): 2' O-methyl modified nucleoside
  misc_feature (19)..(20): Phosphorothioate linkage
  modified_base (20)..(20): 2' O-methyl modified nucleoside
  misc_feature (20)..(21): Phosphorothioate linkage
  modified_base (21)..(21): 2' O-methyl modified nucleoside
cuuacgcugaguacuucgauu

SEQ ID NO: 11524 - RNA, 21 nt, Artificial Sequence
  Description of Artificial Sequence: Synthetic oligonucleotide
  modified_base (1)..(1): 2' O-methyl modified nucleoside
  misc_feature (1)..(2): Phosphorothioate linkage
  modified_base (2)..(2): 2' fluoro-modified nucleoside
  misc_feature (2)..(3): Phosphorothioate linkage
  modified_base (3)..(3): 2' O-methyl modified nucleoside
  modified_base (4)..(4): 2' fluoro-modified nucleoside
  modified_base (5)..(5): 2' O-methyl modified nucleoside
  modified_base (6)..(6): 2' fluoro-modified nucleoside
  modified_base (7)..(7): 2' O-methyl modified nucleoside
  modified_base (8)..(8): 2' fluoro-modified nucleoside
  modified_base (9)..(9): 2' O-methyl modified nucleoside
  modified_base (10)..(10): 2' fluoro-modified nucleoside
  modified_base (11)..(11): 2' O-methyl modified nucleoside
  modified_base (12)..(12): 2' O-methyl modified nucleoside
  modified_base (13)..(13): 2' O-methyl modified nucleoside
  modified_base (14)..(14): 2' fluoro-modified nucleoside
  modified_base (15)..(15): 2' O-methyl modified nucleoside
  modified_base (16)..(16): 2' fluoro-modified nucleoside
  modified_base (17)..(17): 2' O-methyl modified nucleoside
  modified_base (18)..(18): 2' fluoro-modified nucleoside
  modified_base (19)..(19): 2' O-methyl modified nucleoside
  misc_feature (19)..(20): Phosphorothioate linkage
  modified_base (20)..(20): 2' O-methyl modified nucleoside
  misc_feature (20)..(21): Phosphorothioate linkage
  modified_base (21)..(21): 2' O-methyl modified nucleoside
caugaugucaaucugguuguu

SEQ ID NO: 11525 - RNA, 21 nt, Artificial Sequence
  Description of Artificial Sequence: Synthetic oligonucleotide
  modified_base (1)..(1): 2' O-methyl modified nucleoside
  misc_feature (1)..(2): Phosphorothioate linkage
  modified_base (2)..(2): 2' fluoro-modified nucleoside
  misc_feature (2)..(3): Phosphorothioate linkage
  modified_base (3)..(3): 2' O-methyl modified nucleoside
  modified_base (4)..(4): 2' fluoro-modified nucleoside
  modified_base (5)..(5): 2' O-methyl modified nucleoside
  modified_base (6)..(6): 2' fluoro-modified nucleoside
  modified_base (7)..(7): 2' O-methyl modified nucleoside
  modified_base (8)..(8): 2' fluoro-modified nucleoside
  modified_base (9)..(9): 2' O-methyl modified nucleoside
  modified_base (10)..(10): 2' fluoro-modified nucleoside
  modified_base (11)..(11): 2' O-methyl modified nucleoside
  modified_base (12)..(12): 2' O-methyl modified nucleoside
  modified_base (13)..(13): 2' O-methyl modified nucleoside
  modified_base (14)..(14): 2' fluoro-modified nucleoside
  modified_base (15)..(15): 2' O-methyl modified nucleoside
  modified_base (16)..(16): 2' fluoro-modified nucleoside
  modified_base (17)..(17): 2' O-methyl modified nucleoside
  modified_base (18)..(18): 2' fluoro-modified nucleoside
  modified_base (19)..(19): 2' O-methyl modified nucleoside
  misc_feature (19)..(20): Phosphorothioate linkage
  modified_base (20)..(20): 2' O-methyl modified nucleoside
  misc_feature (20)..(21): Phosphorothioate linkage
  modified_base (21)..(21): 2' O-methyl modified nucleoside
uuuugacugaggauguuuguu

SEQ ID NO: 11526 - RNA, 21 nt, Artificial Sequence
  Description of Artificial Sequence: Synthetic oligonucleotide
  modified_base (1)..(1): 2' O-methyl modified nucleoside
  misc_feature (1)..(2): Phosphorothioate linkage
  modified_base (2)..(2): 2' fluoro-modified nucleoside
  misc_feature (2)..(3): Phosphorothioate linkage
  modified_base (3)..(3): 2' O-methyl modified nucleoside
  modified_base (4)..(4): 2' O-methyl modified nucleoside
  modified_base (5)..(5): 2' O-methyl modified nucleoside
  modified_base (6)..(6): 2' fluoro-modified nucleoside
  modified_base (7)..(7): 2' O-methyl modified nucleoside
  modified_base (8)..(8): 2' O-methyl modified nucleoside
  modified_base (9)..(9): 2' O-methyl modified nucleoside
  modified_base (10)..(10): 2' O-methyl modified nucleoside
  modified_base (11)..(11): 2' O-methyl modified nucleoside
  modified_base (12)..(12): 2' O-methyl modified nucleoside
  modified_base (13)..(13): 2' O-methyl modified nucleoside
  modified_base (14)..(14): 2' fluoro-modified nucleoside
  modified_base (15)..(15): 2' O-methyl modified nucleoside
  modified_base (16)..(16): 2' fluoro-modified nucleoside
  modified_base (17)..(17): 2' O-methyl modified nucleoside
  modified_base (18)..(18): 2' O-methyl modified nucleoside
  modified_base (19)..(19): 2' O-methyl modified nucleoside
  misc_feature (19)..(20): Phosphorothioate linkage
  modified_base (20)..(20): 2' O-methyl modified nucleoside
  misc_feature (20)..(21): Phosphorothioate linkage
  modified_base (21)..(21): 2' O-methyl modified nucleoside
caguaguucauacuguguguu

SEQ ID NO: 11527 - RNA, 21 nt, Artificial Sequence
  Description of Artificial Sequence: Synthetic oligonucleotide
  modified_base (1)..(1): 2' O-methyl modified nucleoside
  misc_feature (1)..(2): Phosphorothioate linkage
  modified_base (2)..(2): 2' fluoro-modified nucleoside
  misc_feature (2)..(3): Phosphorothioate linkage
  modified_base (3)..(3): 2' O-methyl modified nucleoside
  modified_base (4)..(4): 2' O-methyl modified nucleoside
  modified_base (5)..(5): 2' O-methyl modified nucleoside
  modified_base (6)..(6): 2' fluoro-modified nucleoside
  modified_base (7)..(7): 2' O-methyl modified nucleoside
  modified_base (8)..(8): 2' O-methyl modified nucleoside
  modified_base (9)..(9): 2' O-methyl modified nucleoside
  modified_base (10)..(10): 2' O-methyl modified nucleoside
  modified_base (11)..(11): 2' O-methyl modified nucleoside
  modified_base (12)..(12): 2' O-methyl modified nucleoside
  modified_base (13)..(13): 2' O-methyl modified nucleoside
  modified_base (14)..(14): 2' fluoro-modified nucleoside
  modified_base (15)..(15): 2' O-methyl modified nucleoside
  modified_base (16)..(16): 2' fluoro-modified nucleoside
  modified_base (17)..(17): 2' O-methyl modified nucleoside
  modified_base (18)..(18): 2' O-methyl modified nucleoside
  modified_base (19)..(19): 2' O-methyl modified nucleoside
  misc_feature (19)..(20): Phosphorothioate linkage
  modified_base (20)..(20): 2' O-methyl modified nucleoside
  misc_feature (20)..(21): Phosphorothioate linkage
  modified_base (21)..(21): 2' O-methyl modified nucleoside
ucgaaguacucagcguaaguu

SEQ ID NO: 11528 - RNA, 21 nt, Artificial Sequence
  Description of Artificial Sequence: Synthetic oligonucleotide
  modified_base (1)..(1): 2' O-methyl modified nucleoside
  misc_feature (1)..(2): Phosphorothioate linkage
  modified_base (2)..(2): 2' fluoro-modified nucleoside
  misc_feature (2)..(3): Phosphorothioate linkage
  modified_base (3)..(3): 2' O-methyl modified nucleoside
  modified_base (4)..(4): 2' O-methyl modified nucleoside
  modified_base (5)..(5): 2' O-methyl modified nucleoside
  modified_base (6)..(6): 2' fluoro-modified nucleoside
  modified_base (7)..(7): 2' O-methyl modified nucleoside
  modified_base (8)..(8): 2' O-methyl modified nucleoside
  modified_base (9)..(9): 2' O-methyl modified nucleoside
  modified_base (10)..(10): 2' O-methyl modified nucleoside
  modified_base (11)..(11): 2' O-methyl modified nucleoside
  modified_base (12)..(12): 2' O-methyl modified nucleoside
  modified_base (13)..(13): 2' O-methyl modified nucleoside
  modified_base (14)..(14): 2' fluoro-modified nucleoside
  modified_base (15)..(15): 2' O-methyl modified nucleoside
  modified_base (16)..(16): 2' fluoro-modified nucleoside
  modified_base (17)..(17): 2' O-methyl modified nucleoside
  modified_base (18)..(18): 2' O-methyl modified nucleoside
  modified_base (19)..(19): 2' O-methyl modified nucleoside
  misc_feature (19)..(20): Phosphorothioate linkage
  modified_base (20)..(20): 2' O-methyl modified nucleoside
  misc_feature (20)..(21): Phosphorothioate linkage
  modified_base (21)..(21): 2' O-methyl modified nucleoside
ucgaaguacucagcguaaguu

SEQ ID NO: 11529 - RNA, 19 nt, Artificial Sequence
  Description of Artificial Sequence: Synthetic oligonucleotide
uauguaccaaggauguuac

SEQ ID NO: 11530 - RNA, 19 nt, Artificial Sequence
  Description of Artificial Sequence: Synthetic oligonucleotide
uaccaaggauguuacagua

SEQ ID NO: 11531 - RNA, 19 nt, Artificial Sequence
  Description of Artificial Sequence: Synthetic oligonucleotide
aacugaagguagauggugu

SEQ ID NO: 11532 - RNA, 19 nt, Artificial Sequence
  Description of Artificial Sequence: Synthetic oligonucleotide
augguguuauaguuaauaa

SEQ ID NO: 11533 - RNA, 19 nt, Artificial Sequence
  Description of Artificial Sequence: Synthetic oligonucleotide
caaugaacucaacagcuau

SEQ ID NO: 11534 - RNA, 19 nt, Artificial Sequence
  Description of Artificial Sequence: Synthetic oligonucleotide
guaacauccuugguacaua

SEQ ID NO: 11535 - RNA, 19 nt, Artificial Sequence
  Description of Artificial Sequence: Synthetic oligonucleotide
uacuguaacauccuuggua

SEQ ID NO: 11536 - RNA, 19 nt, Artificial Sequence
  Description of Artificial Sequence: Synthetic oligonucleotide
acaccaucuaccuucaguu

SEQ ID NO: 11537 - RNA, 19 nt, Artificial Sequence
  Description of Artificial Sequence: Synthetic oligonucleotide
uuauuaacuauaacaccau

SEQ ID NO: 11538 - RNA, 19 nt, Artificial Sequence
  Description of Artificial Sequence: Synthetic oligonucleotide
auagcuguugaguucauug

SEQ ID NO: 11539 - RNA, 21 nt, Artificial Sequence
  Description of Artificial Sequence: Synthetic oligonucleotide
  modified_base (1)..(1): 2' O-methyl modified nucleoside
  misc_feature (1)..(2): Phosphorothioate linkage
  modified_base (2)..(2): 2' fluoro-modified nucleoside
  misc_feature (2)..(3): Phosphorothioate linkage
  modified_base (3)..(3): 2' O-methyl modified nucleoside
  modified_base (4)..(4): 2' O-methyl modified nucleoside
  modified_base (5)..(5): 2' O-methyl modified nucleoside
  modified_base (6)..(6): 2' fluoro-modified nucleoside
  modified_base (7)..(7): 2' O-methyl modified nucleoside
  modified_base (8)..(8): 2' O-methyl modified nucleoside
  modified_base (9)..(9): 2' O-methyl modified nucleoside
  modified_base (10)..(10): 2' O-methyl modified nucleoside
  modified_base (11)..(11): 2' O-methyl modified nucleoside
  modified_base (12)..(12): 2' O-methyl modified nucleoside
  modified_base (13)..(13): 2' O-methyl modified nucleoside
  modified_base (14)..(14): 2' fluoro-modified nucleoside
  modified_base (15)..(15): 2' O-methyl modified nucleoside
  modified_base (16)..(16): 2' fluoro-modified nucleoside
  modified_base (17)..(17): 2' O-methyl modified nucleoside
  modified_base (18)..(18): 2' O-methyl modified nucleoside
  modified_base (19)..(19): 2' O-methyl modified nucleoside
  misc_feature (19)..(20): Phosphorothioate linkage
  modified_base (20)..(20): 2' O-methyl modified nucleoside
  misc_feature (20)..(21): Phosphorothioate linkage
  modified_base (21)..(21): 2' O-methyl modified nucleoside
uuaacauccuugguacauauu

SEQ ID NO: 11540 - RNA, 21 nt, Artificial Sequence
  Description of Artificial Sequence: Synthetic oligonucleotide
  modified_base (1)..(1): 2' O-methyl modified nucleoside
  misc_feature (1)..(2): Phosphorothioate linkage
  modified_base (2)..(2): 2' fluoro-modified nucleoside
  misc_feature (2)..(3): Phosphorothioate linkage
  modified_base (3)..(3): 2' O-methyl modified nucleoside
  modified_base (4)..(4): 2' O-methyl modified nucleoside
  modified_base (5)..(5): 2' O-methyl modified nucleoside
  modified_base (6)..(6): 2' fluoro-modified nucleoside
  modified_base (7)..(7): 2' O-methyl modified nucleoside
  modified_base (8)..(8): 2' O-methyl modified nucleoside
  modified_base (9)..(9): 2' O-methyl modified nucleoside
  modified_base (10)..(10): 2' O-methyl modified nucleoside
  modified_base (11)..(11): 2' O-methyl modified nucleoside
  modified_base (12)..(12): 2' O-methyl modified nucleoside
  modified_base (13)..(13): 2' O-methyl modified nucleoside
  modified_base (14)..(14): 2' fluoro-modified nucleoside
  modified_base (15)..(15): 2' O-methyl modified nucleoside
  modified_base (16)..(16): 2' fluoro-modified nucleoside
  modified_base (17)..(17): 2' O-methyl modified nucleoside
  modified_base (18)..(18): 2' O-methyl modified nucleoside
  modified_base (19)..(19): 2' O-methyl modified nucleoside
  misc_feature (19)..(20): Phosphorothioate linkage
  modified_base (20)..(20): 2' O-methyl modified nucleoside
  misc_feature (20)..(21): Phosphorothioate linkage
  modified_base (21)..(21): 2' O-methyl modified nucleoside
ucgaaguacucagcguaaguu

SEQ ID NO: 11541 - RNA, 21 nt, Artificial Sequence
  Description of Artificial Sequence: Synthetic oligonucleotide
  modified_base (1)..(1): Any 2' O-methyl modified nucleoside
  misc_feature (1)..(2): Phosphorothioate linkage
  modified_base (2)..(2): Any 2' fluoro-modified nucleoside
  misc_feature (2)..(3): Phosphorothioate linkage
  modified_base (3)..(3): Any 2' O-methyl modified nucleoside
  modified_base (4)..(4): Any 2' fluoro-modified nucleoside
  modified_base (5)..(5): Any 2' O-methyl modified nucleoside
  modified_base (6)..(6): Any 2' fluoro-modified nucleoside
  modified_base (7)..(7): Any 2' O-methyl modified nucleoside
  modified_base (8)..(8): Any 2' fluoro-modified nucleoside
  modified_base (9)..(9): Any 2' fluoro-modified nucleoside
  modified_base (10)..(10): Any 2' O-methyl modified nucleoside
  modified_base (11)..(11): Any 2' O-methyl modified nucleoside
  modified_base (12)..(12): Any 2' O-methyl modified nucleoside
  modified_base (13)..(13): Any 2' O-methyl modified nucleoside
  modified_base (14)..(14): Any 2' O-methyl modified nucleoside
  modified_base (15)..(15): Any 2' fluoro-modified nucleoside
  modified_base (16)..(16): Any 2' O-methyl modified nucleoside
  modified_base (17)..(17): Any 2' fluoro-modified nucleoside
  modified_base (18)..(18): Any 2' fluoro-modified nucleoside
  modified_base (19)..(19): Any 2' O-methyl modified nucleoside
  misc_feature (19)..(20): Phosphorothioate linkage
  modified_base (20)..(20): Any 2' O-methyl modified nucleoside
  misc_feature (20)..(21): Phosphorothioate linkage
  modified_base (21)..(21): Any 2' O-methyl modified nucleoside
nnnnnnnnnnnnnnnnnnnnn

SEQ ID NO: 11542 - RNA, 21 nt, Artificial Sequence
  Description of Artificial Sequence: Synthetic oligonucleotide
  modified_base (1)..(1): Any 2' fluoro-modified nucleoside
  misc_feature (1)..(2): Phosphorothioate linkage
  modified_base (2)..(2): Any 2' O-methyl modified nucleoside
  misc_feature (2)..(3): Phosphorothioate linkage
  modified_base (3)..(3): Any 2' fluoro-modified nucleoside
  modified_base (4)..(4): Any 2' O-methyl modified nucleoside
  modified_base (5)..(5): Any 2' fluoro-modified nucleoside
  modified_base (6)..(6): Any 2' O-methyl modified nucleoside
  modified_base (7)..(7): Any 2' fluoro-modified nucleoside
  modified_base (8)..(8): Any 2' O-methyl modified nucleoside
  modified_base (9)..(9): Any 2' O-methyl modified nucleoside
  modified_base (10)..(10): Any 2' fluoro-modified nucleoside
  modified_base (11)..(11): Any 2' fluoro-modified nucleoside
  modified_base (12)..(12): Any 2' fluoro-modified nucleoside
  modified_base (13)..(13): Any 2' fluoro-modified nucleoside
  modified_base (14)..(14): Any 2' fluoro-modified nucleoside
  modified_base (15)..(15): Any 2' O-methyl modified nucleoside
  modified_base (16)..(16): Any 2' fluoro-modified nucleoside
  modified_base (17)..(17): Any 2' O-methyl modified nucleoside
  modified_base (18)..(18): Any 2' O-methyl modified nucleoside
  modified_base (19)..(19): Any 2' fluoro-modified nucleoside
  misc_feature (19)..(20): Phosphorothioate linkage
  modified_base (20)..(20): Any 2' O-methyl modified nucleoside
  misc_feature (20)..(21): Phosphorothioate linkage
  modified_base (21)..(21): Any 2' O-methyl modified nucleoside
nnnnnnnnnnnnnnnnnnnnn

SEQ ID NO: 11543 - RNA, 21 nt, Artificial Sequence
  Description of Artificial Sequence: Synthetic oligonucleotide
  modified_base (1)..(1): Any 2' O-methyl modified nucleoside
  misc_feature (1)..(2): Phosphorothioate linkage
  modified_base (2)..(2): Any 2' fluoro-modified nucleoside
  misc_feature (2)..(3): Phosphorothioate linkage
  modified_base (3)..(3): Any 2' O-methyl modified nucleoside
  modified_base (4)..(4): Any 2' O-methyl modified nucleoside
  modified_base (5)..(5): Any 2' O-methyl modified nucleoside
  modified_base (6)..(6): Any 2' O-methyl modified nucleoside
  modified_base (7)..(7): Any 2' O-methyl modified nucleoside
  modified_base (8)..(8): Any 2' O-methyl modified nucleoside
  modified_base (9)..(9): Any 2' O-methyl modified nucleoside
  modified_base (10)..(10): Any 2' O-methyl modified nucleoside
  modified_base (11)..(11): Any 2' O-methyl modified nucleoside
  modified_base (12)..(12): Any 2' fluoro-modified nucleoside
  modified_base (13)..(13): Any 2' O-methyl modified nucleoside
  modified_base (14)..(14): Any 2' fluoro-modified nucleoside
  modified_base (15)..(15): Any 2' O-methyl modified nucleoside
  modified_base (16)..(16): Any 2' fluoro-modified nucleoside
  modified_base (17)..(17): Any 2' O-methyl modified nucleoside
  modified_base (18)..(18): Any 2' fluoro-modified nucleoside
  modified_base (19)..(19): Any 2' O-methyl modified nucleoside
  misc_feature (19)..(20): Phosphorothioate linkage
  modified_base (20)..(20): Any 2' O-methyl modified nucleoside
  misc_feature (20)..(21): Phosphorothioate linkage
  modified_base (21)..(21): Any 2' O-methyl modified nucleoside
nnnnnnnnnnnnnnnnnnnnn

SEQ ID NO: 11544 - RNA, 21 nt, Artificial Sequence
  Description of Artificial Sequence: Synthetic oligonucleotide
  modified_base (1)..(1): Any 2' O-methyl modified nucleoside
  misc_feature (1)..(2): Phosphorothioate linkage
  modified_base (2)..(2): Any 2' fluoro-modified nucleoside
  misc_feature (2)..(3): Phosphorothioate linkage
  modified_base (3)..(3): Any 2' fluoro-modified nucleoside
  modified_base (4)..(4): Any 2' O-methyl modified nucleoside
  modified_base (5)..(5): Any 2' fluoro-modified nucleoside
  modified_base (6)..(6): Any 2' O-methyl modified nucleoside
  modified_base (7)..(7): Any 2' O-methyl modified nucleoside
  modified_base (8)..(8): Any 2' O-methyl modified nucleoside
  modified_base (9)..(9): Any 2' O-methyl modified nucleoside
  modified_base (10)..(10): Any 2' O-methyl modified nucleoside
  modified_base (11)..(11): Any 2' O-methyl modified nucleoside
  modified_base (12)..(12): Any 2' fluoro-modified nucleoside
  modified_base (13)..(13): Any 2' O-methyl modified nucleoside
  modified_base (14)..(14): Any 2' fluoro-modified nucleoside
  modified_base (15)..(15): Any 2' O-methyl modified nucleoside
  modified_base (16)..(16): Any 2' fluoro-modified nucleoside
  modified_base (17)..(17): Any 2' O-methyl modified nucleoside
  modified_base (18)..(18): Any 2' fluoro-modified nucleoside
  modified_base (19)..(19): Any 2' O-methyl modified nucleoside
  misc_feature (19)..(20): Phosphorothioate linkage
  modified_base (20)..(20): Any 2' O-methyl modified nucleoside
  misc_feature (20)..(21): Phosphorothioate linkage
  modified_base (21)..(21): Any 2' O-methyl modified nucleoside
nnnnnnnnnnnnnnnnnnnnn

SEQ ID NO: 11545 - RNA, 21 nt, Artificial Sequence
  Description of Artificial Sequence: Synthetic oligonucleotide
  modified_base (1)..(1): 2' O-methyl modified nucleoside
  misc_feature (1)..(2): Phosphorothioate linkage
  modified_base (2)..(2): 2' fluoro-modified nucleoside
  misc_feature (2)..(3): Phosphorothioate linkage
  modified_base (3)..(3): 2' O-methyl modified nucleoside
  modified_base (4)..(4): 2' fluoro-modified nucleoside
  modified_base (5)..(5): 2' O-methyl modified nucleoside
  modified_base (6)..(6): 2' fluoro-modified nucleoside
  modified_base (7)..(7): 2' O-methyl modified nucleoside
  modified_base (8)..(8): 2' fluoro-modified nucleoside
  modified_base (9)..(9): 2' fluoro-modified nucleoside
  modified_base (10)..(10): 2' O-methyl modified nucleoside
  modified_base (11)..(11): 2' O-methyl modified nucleoside
  modified_base (12)..(12): 2' O-methyl modified nucleoside
  modified_base (13)..(13): 2' O-methyl modified nucleoside
  modified_base (14)..(14): 2' O-methyl modified nucleoside
  modified_base (15)..(15): 2' fluoro-modified nucleoside
  modified_base (16)..(16): 2' O-methyl modified nucleoside
  modified_base (17)..(17): 2' fluoro-modified nucleoside
  modified_base (18)..(18): 2' fluoro-modified nucleoside
  modified_base (19)..(19): 2' O-methyl modified nucleoside
  misc_feature (19)..(20): Phosphorothioate linkage
  modified_base (20)..(20): 2' O-methyl modified nucleoside
  misc_feature (20)..(21): Phosphorothioate linkage
  modified_base (21)..(21): 2' O-methyl modified nucleoside
auauguaccaaggauguuauu

SEQ ID NO: 11546 - RNA, 21 nt, Artificial Sequence
  Description of Artificial Sequence: Synthetic oligonucleotide
  modified_base (1)..(1): 2' fluoro-modified nucleoside
  misc_feature (1)..(2): Phosphorothioate linkage
  modified_base (2)..(2): 2' O-methyl modified nucleoside
  misc_feature (2)..(3): Phosphorothioate linkage
  modified_base (3)..(3): 2' fluoro-modified nucleoside
  modified_base (4)..(4): 2' O-methyl modified nucleoside
  modified_base (5)..(5): 2' fluoro-modified nucleoside
  modified_base (6)..(6): 2' O-methyl modified nucleoside
  modified_base (7)..(7): 2' fluoro-modified nucleoside
  modified_base (8)..(8): 2' O-methyl modified nucleoside
  modified_base (9)..(9): 2' O-methyl modified nucleoside
  modified_base (10)..(10): 2' fluoro-modified nucleoside
  modified_base (11)..(11): 2' fluoro-modified nucleoside
  modified_base (12)..(12): 2' fluoro-modified nucleoside
  modified_base (13)..(13): 2' fluoro-modified nucleoside
  modified_base (14)..(14): 2' fluoro-modified nucleoside
  modified_base (15)..(15): 2' O-methyl modified nucleoside
  modified_base (16)..(16): 2' fluoro-modified nucleoside
  modified_base (17)..(17): 2' O-methyl modified nucleoside
  modified_base (18)..(18): 2' O-methyl modified nucleoside
  modified_base (19)..(19): 2' fluoro-modified nucleoside
  misc_feature (19)..(20): Phosphorothioate linkage
  modified_base (20)..(20): 2' O-methyl modified nucleoside
  misc_feature (20)..(21): Phosphorothioate linkage
  modified_base (21)..(21): 2' O-methyl modified nucleoside
auauguaccaaggauguuauu

SEQ ID NO: 11547 - RNA, 21 nt, Artificial Sequence
  Description of Artificial Sequence: Synthetic oligonucleotide
  modified_base (1)..(1): 2' O-methyl modified nucleoside
  misc_feature (1)..(2): Phosphorothioate linkage
  modified_base (2)..(2): 2' fluoro-modified nucleoside
  misc_feature (2)..(3): Phosphorothioate linkage
  modified_base (3)..(3): 2' O-methyl modified nucleoside
  modified_base (4)..(4): 2' O-methyl modified nucleoside
  modified_base (5)..(5): 2' O-methyl modified nucleoside
  modified_base (6)..(6): 2' O-methyl modified nucleoside
  modified_base (7)..(7): 2' O-methyl modified nucleoside
  modified_base (8)..(8): 2' O-methyl modified nucleoside
  modified_base (9)..(9): 2' O-methyl modified nucleoside
  modified_base (10)..(10): 2' O-methyl modified nucleoside
  modified_base (11)..(11): 2' O-methyl modified nucleoside
  modified_base (12)..(12): 2' fluoro-modified nucleoside
  modified_base (13)..(13): 2' O-methyl modified nucleoside
  modified_base (14)..(14): 2' fluoro-modified nucleoside
  modified_base (15)..(15): 2' O-methyl modified nucleoside
  modified_base (16)..(16): 2' fluoro-modified nucleoside
  modified_base (17)..(17): 2' O-methyl modified nucleoside
  modified_base (18)..(18): 2' fluoro-modified nucleoside
  modified_base (19)..(19): 2' O-methyl modified nucleoside
  misc_feature (19)..(20): Phosphorothioate linkage
  modified_base (20)..(20): 2' O-methyl modified nucleoside
  misc_feature (20)..(21): Phosphorothioate linkage
  modified_base (21)..(21): 2' O-methyl modified nucleoside
uaacauccuugguacauauuu

SEQ ID NO: 11548 - RNA, 21 nt, Artificial Sequence
  Description of Artificial Sequence: Synthetic oligonucleotide
  modified_base (1)..(1): 2' O-methyl modified nucleoside
  misc_feature (1)..(2): Phosphorothioate linkage
  modified_base (2)..(2): 2' fluoro-modified nucleoside
  misc_feature (2)..(3): Phosphorothioate linkage
  modified_base (3)..(3): 2' fluoro-modified nucleoside
  modified_base (4)..(4): 2' O-methyl modified nucleoside
  modified_base (5)..(5): 2' fluoro-modified nucleoside
  modified_base (6)..(6): 2' O-methyl modified nucleoside
  modified_base (7)..(7): 2' O-methyl modified nucleoside
  modified_base (8)..(8): 2' O-methyl modified nucleoside
  modified_base (9)..(9): 2' O-methyl modified nucleoside
  modified_base (10)..(10): 2' O-methyl modified nucleoside
  modified_base (11)..(11): 2' O-methyl modified nucleoside
  modified_base (12)..(12): 2' fluoro-modified nucleoside
  modified_base (13)..(13): 2' O-methyl modified nucleoside
  modified_base (14)..(14): 2' fluoro-modified nucleoside
  modified_base (15)..(15): 2' O-methyl modified nucleoside
  modified_base (16)..(16): 2' fluoro-modified nucleoside
  modified_base (17)..(17): 2' O-methyl modified nucleoside
  modified_base (18)..(18): 2' fluoro-modified nucleoside
  modified_base (19)..(19): 2' O-methyl modified nucleoside
  misc_feature (19)..(20): Phosphorothioate linkage
  modified_base (20)..(20): 2' O-methyl modified nucleoside
  misc_feature (20)..(21): Phosphorothioate linkage
  modified_base (21)..(21): 2' O-methyl modified nucleoside
uaacauccuugguacauauuu
